(19) United States
(12) Patent Application Publication
(10) Pub. No.: US 2002/0082225 A1
(43) Pub. Date: Jun. 27, 2002

(54) ENZYMATIC NUCLEIC ACID TREATMENT OF DISEASES OR CONDITIONS RELATED TO HEPATITIS C VIRUS INFECTION

(76) Inventors: LAWRENCE BLATT, BOULDER, CO (US); JAMES A. MCSWIGGEN, BOULDER, CO (US); BETH ROBERTS, FERDERAL HEIGHTS, CO (US); PAMELA A. PAVCO, LAFAYETTE, CO (US); DENNIS MACEJACK, ARVADA, CO (US)

Correspondence Address: MCDONNELL BOEHNEN HULBERT & BERGHOFF, 300 SOUTH WACKER DRIVE, SUITE 3200, CHICAGO, IL, 60606, US

(21) Appl. No.: 09/274,553

(22) Filed: Mar. 23, 1999

(51) Int. Cl. C12Q 1/68; C07H 21/04; A61K 31/70; A01N 43/04; C12N 15/74

(52) U.S. Cl. 514/44; 435/6; 435/475; 536/24.5

(57) ABSTRACT

Enzymatic nucleic acid molecules which modulate the expression and/or replication of hepatitis C.

[0001] This patent application claims priority to Blatt et al., U.S. Ser. No. (Not Yet Assigned), filed Feb. 24, 1999, Blatt et al., U.S. Ser. No. 60/100,842, filed Sep. 18, 1998, and McSwiggen et al., U.S. Ser. No. 60/083,217 filed Apr. 27, 1998, all of these earlier applications are entitled “ENZYMATIC NUCLEIC ACID TREATMENT OF DISEASES OR CONDITIONS RELATED TO HEPATITIS C VIRUS INFECTION”. Each of these applications are hereby incorporated by reference herein in their entirety including the drawings.

### BACKGROUND OF THE INVENTION

[0002] This invention relates to methods and reagents for the treatment of diseases or conditions relating to the hepatitic C virus infection.

[0003] The following is a discussion of relevant art, none of which is admitted to be prior art to the present invention.

[0004] In 1989, the HCV was determined to be an RNA virus and was identified as the causative agent of most non-A non-B viral Hepatitis (Choo et al., Science. 1989;

[0005] 244:359-362). Unlike retroviruses such as HIV, HCV does not go though a DNA replication phase and no integrated forms of the viral genome into the host chromosome have been detected (Houghton et al., Hepatology 1991;14:381-388). Rather, replication of the coding (plus) strand is mediated by the production of a replicative (minus) strand leading to the generation of several copies of plus strand HCV RNA. The genome consists of a single, large, open-reading frame that is translated into a polyprotein (Kato et al., FEBS Letters. 1991; 280: 325-328). This polyprotein subsequently undergoes post-translational cleavage, producing several viral proteins (Leinbach et al., Virology. 1994: 204:163-169).

[0006] Examination of the 9.5-kilobase genome of HCV has demonstrated that the viral nucleic acid can mutate at a high rate (Smith et al., Mol. Evol. 1997 45:238-246). This rate of mutation has led to the evolution of several distinct genotypes of HCV that share approximately 70% sequence identity (Simmonds et al. J. Gen. Virol. 1994;75 :1053-061). It is important to note that these sequences are evolutionarily quite distant. For example, the genetic identity between humans and primates such as the chimpanzee is approximately 98%. In addition, it has been demonstrated that an HCV infection in an individual patient is composed of several distinct and evolving quasispecies that have 98% identity at the RNA level. Thus, the HCV genome is hypervariable and continuously changing. Although the HCV genome is hypervariable, there are 3 regions of the genome that are highly conserved. These conserved sequences occur in the 5′ and 3′ non-coding regions as well as the 5′-end of the core protein coding region and are thought to be vital for HCV RNA replication as well as translation of the HCV polyprotein. Thus, therapeutic agents that target these conserved HCV genomic regions may have a significant impact over a wide range of HCV genotypes. Moreover, it is unlikely that drug resistance will occur with ribozymes specific to conserved regions of the HCV genome. In contrast, therapeutic modalities that target inhibition of enzymes such as the viral proteases or helicase are likely to result in the selection for drug resistant strains since the RNA for these viral encoded enzymes is located in the hypervariable portion of the HCV genome.

[0007] After initial exposure to HCV, the patient will experience a transient rise in liver enzymes, which indicates that inflammatory processes are occurring (Alter et al, IN: Seeff L B, Lewis J H, eds. Current Perspectives in Hepatology. New York: Plenum Medical Book Co; 1989:83-89). This elevation in liver enzymes will occur at least 4 weeks after 25 the initial exposure and may last for up to two months (Farci et al., New England Journal of Medicine. 1991:325:98-104). Prior to the rise in liver enzymes, it is possible to detect HCV RNA in the patient's serum using RT-PCR analysis (Takahashi et al., American Journal of Gastroenterology. 1993:88:2:240-243). This stage of the disease is called the acute stage and usually goes undetected since 75% of patients with acute viral hepatitis from HCV infection are asymptomatic. The remaining 25% of these patients develop jaundice or other symptoms of hepatitis.

[0008] Acute HCV infection is a benign disease, however, and as many as 80% of acute HCV patients progress to chronic liver disease as evidenced by persistent elevation of serum alanine aminotransferase (ALT) levels and by continual presence of circulating HCV RNA (Sherlock, Lancet 1992; 339:802). The natural progression of chronic HCV infection over a 10 to 20 year period leads to cirrhosis in 20to50% of patients (Davis et al., Infectious Agents and Disease 1993;2:150:154) and progression of HCV infection to hepatocellular carcinoma has been well documented (Liang et al., Hepatology. 1993; 18:1326-1333; Tong et al., Western Journal of Medicine, 1994; Vol. 160, No. 2: 133-138). There have been no studies that have determined sub-populations that are most likely to progress to cirrhosis and/or hepatocellular carcinoma, thus all patients have equal risk of progression.

[0009] It is important to note that the survival for patients diagnosed with hepatocellular carcinoma is only 0.9 to 12.8 months from initial diagnosis (Takahashi et al., American Journal of Gastroenterology. 1993:88:2:240-243). Treatment of hepatocellular carcinoma with chemotherapeutic agents has not proven effective and only 10% of patients will benefit from surgery due to extensive tumor invasion of the liver (Trinchet et al., Presse Medicine. 1994:23:831-833). Given the aggressive nature of primary hepatocellular carcinoma, the only viable treatment alternative to surgery is liver transplantation (Pichlmayr et al., Hepatology. 1994:20:33S-40S).

[0010] Upon progression to cirrhosis, patients with chronic HCV infection present with clinical features, which are common to clinical cirrhosis regardless of the initial cause (D'Amico et al., Digestive Diseases and Sciences. 1986;31:5: 468-475). These clinical features may include: bleeding esophageal varices, ascites, jaundice, and encephalopathy (Zakim D, Boyer T D. Hepatology a textbook of liver disease. Second Edition Volume 1. 1990 W. B. Saunders Company. Philadelphia). In the early stages of cirrhosis, patients are classified as compensated meaning that although liver tissue damage has occurred, the patient's liver is still able to detoxify metabolites in the blood-stream. In addition, most patients with compensated liver disease are asymptomatic and the minority with symptoms report only minor symptoms such as dyspepsia and weakness. In the later stages of cirrhosis, patients are classified as decompensated meaning that their ability to detoxify metabolites in the bloodstream is diminished and it is at this stage that the clinical features described above will present.

[0011] In 1986, D'Amico et al. described the clinical manifestations and survival rates in 1155 patients with both alcoholic and viral associated cirrhosis (D'Amico supra). Of the 1155 patients, 435 (37%) had compensated disease although 70% were asymptomatic at the beginning of the study. The remaining 720 patients (63%) had decompensated liver disease with 78% presenting with a history of ascites, 31% with jaundice, 17% had bleeding and 16% had encephalopathy. Hepatocellular carcinoma was observed in six (0.5%) patients with compensated disease and in 30 (2.6%) patients with decompensated disease.

[0012] Over the course of six years, the patients with compensated cirrhosis developed clinical features of decompensated disease at a rate of 10% per year. In most cases, ascites was the first presentation of decompensation. In addition, hepatocellular carcinoma developed in 59 patients who initially presented with compensated disease by the end of the six-year study.

[0013] With respect to survival, the D'Amico study indicated that the five-year survival rate for all patients on the study was only 40%. The six-year survival rate for the patients who initially had compensated cirrhosis was 54% while the six-year survival rate for patients who initially presented with decompensated disease was only 21%. There were no significant differences in the survival rates between the patients who had alcoholic cirrhosis and the patients with viral related cirrhosis. The major causes of death for the patients in the D'Amico study were liver failure in 49%; hepatocellular carcinoma in 22%; and, bleeding in 13% (D'Amico supra).

[0014] Chronic Hepatitis C is a slowly progressing inflammatory disease of the liver, mediated by a virus (HCV) that can lead to cirrhosis, liver failure and/or hepatocellular carcinoma over a period of 10 to 20 years. In the US, it is estimated that infection with HCV accounts for 50,000 new cases of acute hepatitis in the United States each year (NIH Consensus Development Conference Statement on Management of Hepatitis C March 1997). The prevalence of HCV in the United States is estimated at 1.8% and the CDC places the number of chronically infected Americans at approximately 4.5 million people. The CDC also estimates that up to 10,000 deaths per year are caused by chronic HCV infection. The prevalence of HCV in the United States is estimated at 1.8% and the CDC places the number of chronically infected Americans at approximately 4.5 million people. The CDC also estimates that up to 10,000 deaths per year are caused by chronic HCV infection.

[0015] Numerous well controlled clinical trials using interferon (IFN-alpha) in the treatment of chronic HCV infection have demonstrated that treatment three times a week results in lowering of serum ALT values in approximately 50% (range 40% to 70%) of patients by the end of 6 months of therapy (Davis et al., New England Journal of Medicine 1989; 321:1501-1506; Marcellin et al., Hepatology. 1991; 13:393-397; Tong et al., Hepatology 1997:26:747-754; Tong et al., Hepatology 1997 26(6): 1640-1645). However, following cessation of interferon treatment, approximately 50% of the responding patients relapsed, resulting in a “durable” response rate as assessed by normalization of serum ALT concentrations of approximately 20 to 25%.

[0016] In recent years, direct measurement of the HCV RNA has become possible through use of either the branched-DNA or Reverse Transcriptase Polymerase Chain Reaction (RT-PCR) analysis. In general, the RT-PCR methodology is more sensitive and leads to more accurate assessment of the clinical course (Tong et al., supra). Studies that have examined six months of type 1 interferon therapy using changes in HCV RNA values as a clinical endpoint have demonstrated that up to 35% of patients will have a loss of HCV RNA by the end of therapy (Marcellin et al., supra). However, as with the ALT endpoint, about 50% of the patients relapse six months following cessation of therapy resulting in a durable virologic response of only 12% (Marcellin et al., supra). Studies that have examined 48 weeks of therapy have demonstrated that the sustained virological response is up to 25% (NIH consensus statement: 1997). Thus, standard of care for treatment of chronic HCV infection with type 1 interferon is now 48 weeks of therapy using changes in HCV RNA concentrations as the primary assessment of efficacy (Hoofnagle et al., New England Journal of Medicine 1997; 336(5) 347-356).

[0017] Side effects resulting from treatment with type 1 interferons can be divided into four general categories, which include 1. Influenza-like symptoms; 2. Neuropsychiatric; 3. Laboratory abnormalities; and, 4. Miscellaneous (Dusheiko et al., Journal of Viral Hepatitis. 1994:1:3-5). Examples of influenza-like symptoms include; fatigue, fever; myalgia; malaise; appetite loss; tachycardia; rigors; headache and arthralgias. The influenza-like symptoms are usually short-lived and tend to abate after the first four weeks of dosing (Dushieko et al., supra). Neuropsychiatric side effects include: irritability, apathy; mood changes; insomnia; cognitive changes and depression. The most important of these neuropsychiatric side effects is depression and patients who have a history of depression should not be given type 1 interferon. Laboratory abnormalities include; reduction in myeloid cells including granulocytes, platelets and to a lesser extent red blood cells. These changes in blood cell counts rarely lead to any significant clinical sequellae (Dushieko et al., supra). In addition, increases in triglyceride concentrations and elevations in serun alanine and aspartate aminotransferase concentration have been observed. Finally, thyroid abnormalities have been reported. These thyroid abnormalities are usually reversible after cessation of interferon therapy and can be controlled with appropriate medication while on therapy. Miscellaneous side effects include nausea; diarrhea; abdominal and back pain; pruritus; alopecia; and rhinorrhea. In general, most side effects will abate after 4 to 8 weeks of therapy (Dushieko et al., supra).

[0018] Welch et al., Gene Therapy 1996 3(11): 994-1001 describe in vitro an in vivo studies with two vector expressed hairpin ribozymes targeted against hepatitis C virus.

[0019] Sakamoto et al., J. Clinical Investigation 1996 98(12):2720-2728 describe intracellular cleavage of hepatitis C virus RNA and inhibition of viral protein translation by certain vector expressed hammerhead ribozymes.

[0020] Lieber et al., J. Virology 1996 70(12):8782-8791 describe elimination of hepatitis C virus RNA in infected human hepatocytes by adenovirus-mediated expression of certain hammerhead ribozymes.

[0021] Ohkawa et al., 1997, J Hepatology, 27; 78-84, describe in vitro cleavage of HCV RNA and inhibition of viral protein translation using certain in vitro transcribed hammerhead ribozymes.

[0022] Barber et al., International PCT Publication No. WO 97/32018, describe the use of an adenovirus vector to express certain anti-hepatitis C virus hairpin ribozymes.

[0023] Kay et al., International PCT Publication No. WO 96/18419, describe certain recombinant adenovirus vectors to express anti-HCV hammerhead ribozyme.

[0024] Yamada et al., Japanese Patent Application No. JP 07231 784 describe a specific poly-(L)-lysine conjugated hammerhead ribozyme targeted against HCV.

[0025] Draper, U.S. Pat. No. 5,610,054, descibes enzymatic nucleic acid molecule capable of inhibiting replication of HCV.

[0026] Alt et al., Hepatology 1995 22(3): 707-717, describe specific inhibition of hepatitis C viral gene expression by certain antisense phosphorothioate oligodeoxynucleotides.

### SUMMARY OF THE INVENTION

[0027] This invention relates to ribozymes, or enzymatic nucleic acid molecules, directed to cleave RNA species of hepatitis C virus (HCV) and/or encoded by the HCV. In particular, applicant describes the selection and function of ribozymes capable of specifically cleaving HCV RNA. Such ribozymes may be used to treat diseases associated with HCV infection.

[0028] Due to the high sequence variability of the HCV genome, selection of ribozymes for broad therapeutic applications would likely involve the conserved regions of the HCV genome. Specifically, the present invention describes hammerhead ribozymes that would cleave in the conserved regions of the HCV genome. A list of the thirty hammerhead ribozymes derived from the conserved regions (5′—Non Coding Region (NCR), 5′—end of core protein coding region, and 3′—NCR) of the HCV genome is shown in Table IV. In general, Applicant has found that enzymatic nucleic acid molecules that cleave sites located in the 5′ end of the HCV genome would block translation while ribozymes that cleave sites located in the 3′ end of the genome would block RNA replication. Approximately 50 HCV isolates have been identified and a sequence alignment of these isolates from genotypes 1a, 1b, 2a, 2b, 2c, 3a, 3b, 4a, 5a, and 6 was performed. These alignments were used by the Applicant to identify 30 hammerhead ribozymes sites within regions highly conserved between genotypes. Twenty three ribozyme sites were identified in regions of greatest homology within the conserved region. Therefore, one ribozyme can be designed to cleave all the different isolates of HCV. According to the Applicant, ribozymes designed against conserved regions of various HCV isolates will enable efficient inhibition of HCV replication in diverse patient populations and may ensure the effectiveness of the ribozymes against HCV quasispecies which evolve due to mutations in the non-conserved regions of the HCV genome.

[0029] By “inhibit” is meant that the activity of HCV or level of RNAs encoded by HCV genome is reduced below that observed in the absence of the nucleic acid, particularly, inhibition with ribozymes preferably is below that level observed in the presence of an inactive RNA molecule able to bind to the same site on the mRNA, but unable to cleave that RNA.

[0030] By “enzymatic nucleic acid” it is meant a nucleic acid molecule capable of catalyzing reactions including, but not limited to, site-specific cleavage and/or ligation of other nucleic acid molecules, cleavage of peptide and amide bonds, and trans-splicing. Such a molecule with endonuclease activity may have complementarity in a substrate binding region to a specified gene target, and also has an enzymatic activity that specifically cleaves RNA or DNA in that target. That is, the nucleic acid molecule with endonuclease activity is able to intramolecularly or intermolecularly cleave RNA or DNA and thereby inactivate a target RNA or DNA molecule. This complementarity functions to allow sufficient hybridization of the enzymatic RNA molecule to the target RNA or DNA to allow the cleavage to occur. 100% complementarity is preferred, but complementarity as low as 50-75% may also be useful in this invention. The nucleic acids may be modified at the base, sugar, and/or phosphate groups. The term enzymatic nucleic acid is used interchangeably with phrases such as ribozymes, catalytic RNA, enzymatic RNA, catalytic DNA, catalytic oligonucleotides, nucleozyme, DNAzyme, RNA enzyme, endoribonuclease, endonuclease, minizyme, leadzyme, oligozyme or DNA enzyme. All of these terminologies describe nucleic acid molecules with enzymatic activity. The specific enzymatic nucleic acid molecules described in the instant application are not limiting in the invention and those skilled in the art will recognize that all that is important in an enzymatic nucleic acid molecule of this invention is that it has a specific substrate binding site which is complementary to one or more of the target nucleic acid regions, and that it have nucleotide sequences within or surrounding that substrate binding site which impart a nucleic acid cleaving activity to the molecule.

[0031] By “enzymatic portion” or “catalytic domain” is meant that portion/region of the ribozyme essential for cleavage of a nucleic acid substrate (for example see FIG. 1).

[0032] By “substrate binding arm” or “substrate binding domain” is meant that portion/region of a ribozyme which is complementary to (i.e., able to base-pair with) a portion of its substrate. Generally, such complementarity is 100%, but can be less if desired. For example, as few as 10 bases out of 14 may be base-paired. Such arms are shown generally in FIG. 1 and 3. That is, these arms contain sequences within a ribozyme which are intended to bring ribozyme and target RNA together through complementary base-pairing interactions. The ribozyme of the invention may have binding arms that are contiguous or non-contiguous and may be of varying lengths. The length of the binding arm(s) are preferably greater than or equal to four nucleotides; specifically 12-100 nucleotides; more specifically 14-24 nucleotides long. If two binding arms are chosen, the design is such that the length of the binding arms are symmetrical (i.e., each of the binding arms is of the same length; e.g., five and five nucleotides, six and six nucleotides or seven and seven nucleotides long) or asymmetrical (ie., the binding arms are of different length; e.g., six and three nucleotides; three and six nucleotides long; four and five nucleotides long; four and six nucleotides long; four and seven nucleotides long; and the like).

[0033] In one of the preferred embodiments of the inventions herein, the enzymatic 1 0 nucleic acid molecule is formed in a hammerhead or hairpin motif, but may also be formed in the motif of a hepatitis d virus, group I intron, group II intron or RNaseP RNA (in association with an RNA guide sequence) or Neurospora VS RNA. Examples of such hammerhead motifs are described by Dreyfus, supra, Rossi et al., 1992, AIDS Research and Human Retroviruses 8, 183; of hairpin motifs by Hampel et al., EP0360257, Hampel and Tritz, 1989 Biochemistry 28, 4929, Feldstein et al., 1989, Gene 82, 53, Haseloff and Gerlach, 1989, Gene, 82, 43, and Hampel et al., 1990 Nucleic Acids Res. 18, 299; of the hepatitis d virus motif is described by Perrotta and Been, 1992 Biochemistry 31, 16; of the RNaseP motif by Guerrier-Takada et al., 1983 Cell 35, 849; Forster and Altman, 1990, Science 249, 783; Li and Altman, 1996, Nucleic Acids Res. 24, 835; Neurospora VS RNA ribozyme motif is described by Collins (Saville and Collins, 1990 Cell 61, 685-696; Saville and Collins, 1991 Proc. Natl. Acad. Sci. USA 88, 8826-8830; Collins and Olive, 1993 Biochemistry 32, 2795-2799; Guo and Collins, 1995, EMBO. J 14, 363); Group II introns are described by Griffin et al., 1995, Chem. Biol. 2, 761; Michels and Pyle, 1995, Biochemistry 34, 2965; Pyle et al., International PCT Publication No. WO 96/22689; of the Group I intron by Cech et al., U.S. Pat. No. 4,987,071; and of DNAzyme motif by Chartrand et al., 1995, Nucleic Acids Research 23, 4092; Santoro et al., 1997, PNAS 94, 4262. These specific motifs are not limiting in the invention and those skilled in the art will recognize that all that is important in an enzymatic nucleic acid molecule of this invention is that it has a specific substrate binding site which is complementary to one or more of the target gene RNA regions, and that it have nucleotide sequences within or surrounding that substrate binding site which impart an RNA cleaving activity to the molecule.

[0034] By “equivalent” RNA to HCV is meant to include those naturally occurring RNA molecules associated with HCV infection in various animals, including human, rodent, primate, rabbit and pig. The equivalent RNA sequence also includes in addition to the coding region, regions such as 5′-untranslated region, 3′-untranslated region, introns, intron-exon junction and the like.

[0035] By “complementarity” is meant a nucleic acid that can form hydrogen bond(s) with another RNA sequence by either traditional Watson-Crick or other non-traditional types (for example, Hoogsteen type) of base-paired interactions.

[0036] In a preferred embodiment the invention provides a method for producing a class of enzymatic cleaving agents which exhibit a high degree of specificity for the RNA of a desired target. The enzymatic nucleic acid molecule is preferably targeted to a highly conserved sequence region of a target mRNAs encoding HCV proteins such that specific treatment of a disease or condition can be provided with either one or several enzymatic nucleic acids. Such enzymatic nucleic acid molecules can be delivered exogenously to specific cells as required. Alternatively, the ribozymes can be expressed from DNA/RNA vectors that are delivered to specific cells.

[0037] Such ribozymes are useful for the prevention of the diseases and conditions discussed above, and any other diseases or conditions that are related to the levels of HCV activity in a cell or tissue.

[0038] By “related” is meant that the inhibition of HCV RNAs and thus reduction in the level respective viral activity will relieve to some extent the symptoms of the disease or condition.

[0039] In preferred embodiments, the ribozymes have binding arms which are complementary to the target sequences in Tables IV-IX Examples of such ribozymes are also shown in Tables IV-IX. Examples of such ribozymes consist essentially of sequences defmed in these Tables. Other sequences may be present which do not interfere with such cleavage.

[0040] By “consists essentially of” is meant that the active ribozyme contains an enzymatic center or core equivalent to those in the examples, and binding arms able to bind MRNA such that cleavage at the target site occurs. Other sequences may be present which do not interfere with such cleavage.

[0041] Thus, in a first aspect, the invention features ribozymes that inhibit gene expression and/or viral replication. These chemically or enzymatically synthesized RNA molecules contain substrate binding domains that bind to accessible regions of their target mRNAs. The RNA molecules also contain domains that catalyze the cleavage of RNA. The RNA molecules are preferably ribozymes of the hammerhead or hairpin motif. Upon binding, the ribozymes cleave the target mRNAs, preventing translation and protein accumulation. In the absence of the expression of the target gene, HCV gene expression and/or replication is inhibited.

[0042] In a preferred embodiment, ribozymes are added directly, or can be complexed with cationic lipids, packaged within liposomes, or otherwise delivered to target cells. The nucleic acid or nucleic acid complexes can be locally administered to relevant tissues ex vivo, or in vivo through injection, infusion pump or stent, with or without their incorporation in biopolymers. In another preferred embodiment, the ribozyme is administered to the site of HCV activity (e.g., hepatocytes) in an appropriate liposomal vehicle.

[0043] In another aspect of the invention, ribozymes that cleave target molecules and inhibit HCV activity are expressed from transcription units inserted into DNA or RNA vectors. The recombinant vectors are preferably DNA plasmids or viral vectors. Ribozyme expressing viral vectors could be constructed based on, but not limited to, adeno-associated virus, retrovirus, adenovirus, or alphavirus. Preferably, the recombinant vectors capable of expressing the ribozymes are delivered as described above, and persist in target cells. Alternatively, viral vectors may be used that provide for transient expression of ribozymes. Such vectors might be repeatedly administered as necessary. Once expressed, the ribozymes cleave the target mRNA. Delivery of ribozyme expressing vectors could be systemic, such as by intravenous or intramuscular administration, by administration to target cells ex-planted from the patient followed by reintroduction into the patient, or by any other means that would allow for introduction into the desired target cell (for a review see Couture and Stinchcomb, 1996, TIG., 12, 510). In another aspect of the invention, ribozymes that cleave target molecules and inhibit viral replication are expressed from transcription units inserted into DNA, RNA, or viral vectors. Preferably, the recombinant vectors capable of expressing the ribozymes are locally delivered as described above, and transiently persist in smooth muscle cells. However, other mammalian cell vectors that direct the expression of RNA may be used for this purpose.

[0044] By “patient” is meant an organism which is a donor or recipient of explanted cells or the cells themselves. “Patient” also refers to an organism to which enzymatic nucleic acid molecules can be administered. Preferably, a patient is a mammal or mammalian cells. More preferably, a patient is a human or human cells.

[0045] By “vectors” is meant any nucleic acid- and/or viral-based technique used to deliver a desired nucleic acid.

[0046] These ribozymes, individually, or in combination or in conjunction with other drugs, can be used to treat diseases or conditions discussed above. For example, to treat a disease or condition associated with HCV levels, the patient may be treated, or other appropriate cells may be treated, as is evident to those skilled in the art.

[0047] Other features and advantages of the invention will be apparent from the following description of the preferred embodiments thereof, and from the claims.

### DESCRIPTION OF THE PREFERRED EMBODIMENTS

[0048] The drawings will first briefly be described.

[0049] Drawings:

[0050] FIG. 1 shows the secondary structure model for seven different classes of enzymatic nucleic acid molecules. Arrow indicates the site of cleavage. ------ indicate the target sequence. Lines interspersed with dots are meant to indicate tertiary interactions.—is meant to indicate base-paired interaction. Group I Intron: P1-P9.0 represent various stem-loop structures (Cech et al., 1994, Nature Struc. Bio., 1, 273). RNase P (MlRNA): EGS represents external guide sequence (Forster et al., 1990, Science, 249, 783; Pace et al., 1990, J Biol. Chem., 265, 3587). Group II Intron: 5′ SS means 5′ splice site; 3′ SS means 3′-splice site; IBS means intron binding site; EBS means exon binding site (Pyle et al., 1994, Biochemistry, 33, 2716). VS RNA: I-VI are meant to indicate six stem-loop structures; shaded regions are meant to indicate tertiary interaction (Collins, International PCT Publication No. WO 96/19577). HDV Ribozyme:: I-IV are meant to indicate four stem-loop structures (Been et al. U.S. Pat. No. 5,625,047). Hammerhead Ribozyme: 1-III are meant to indicate three stem-loop structures; stems I-III can be of any length and may be symmetrical or asymmetrical (Usman et al., 1996, Curr. Op. Struct. Bio., 1, 527). Hairpin Ribozyme: Helix 1, 4 and 5 can be of any length; Helix 2 is between 3 and 8 base-pairs long; Y is a pyrimidine; Helix 2 (H2) is provided with a least 4 base pairs (ie., n is 1, 2, 3 or 4) and helix 5 can be optionally provided of length 2 or more bases (preferably 3-20 bases, i.e., m is from 1-20 or more). Helix 2 and helix 5 may be covalently linked by one or more bases (i.e., r is≦1 base). Helix 1, 4 or 5 may also be extended by 2 or more base pairs (e.g., 4-20 base pairs) to stabilize the ribozyme structure, and preferably is a protein binding site. In each instance, each N and N′ independently is any normal or modified base and each dash represents a potential base-pairing interaction. These nucleotides may be modified at the sugar, base or phosphate. Complete base-pairing is not required in the helices, but is preferred. Helix 1 and 4 can be of any size (i.e., o and p is each independently from 0 to any number, e.g., 20) as long as some base-pairing is maintained. Essential bases are shown as specific bases in the structure, but those in the art will recognize that one or more may be modified chemically (abasic, base, sugar and/or phosphate modifications) or replaced with another base without significant effect. Helix 4 can be formed from two separate molecules, i.e., without a connecting loop. The connecting loop when present may be a ribonucleotide with or without modifications to its base, sugar or phosphate. “q” is≦2 bases. The connecting loop can also be replaced with a non-nucleotide linker molecule. H refers to bases A, U, or C. Y refers to pyrimidine bases. “______” refers to a covalent bond. (Burke et al., 1996, Nucleic Acids & Mol. Biol., 10, 129; Chowrira et al., U.S. Pat. No. 5,631,359).

[0051] FIG. 2 is a graph displaying the ability of ribozymes targeting various sites within the conserved 5′ HCV UTR region to cleave the transcripts made from several genotypes.

[0052] FIG. 3 is a schematic representation of the Dual Reporter System utilized to demonstrate ribozyme mediated reduction of luciferase activity in cell culture.

[0053] FIG. 4 is a graph demonstrating the ability of ribozymes to reduce luciferase activity in OST-7 cells.

[0054] FIG. 5 is a graph demonstrating the ability of ribozymes targeting sites HCV.5-3 13 and HCV.5-318, to reduce luciferase activity in OST-7 cells compared to their inactive controls.

[0055] FIG. 6A is a bar graph demonstrating the effect of ribozyme treatment on HCV-Polio virus (PV) replication. HeLa cells in 96-well plates were infected with HCV-PV at a multiplicity of infection (MOI) of 0.1. Virus inoculum was then replaced with media containing 5% serum and ribozyme or control (200 nM), as indicated, complexed to a cationic lipid. After 24 hour cells were lysed 3 times by freeze/thaw and virus was quantified by plaque assay. Scrambled control (SAC), binding control (BAC), 3 P═S ribozymes, and 4 P═S ribozymes are indicated. Plaque forming units (pfu)/ml are shown as the mean of triplicate samples+standard deviation (S.D.).

[0056] FIG. 6B is a bar graph demonstrating the effect of ribozyme treatment on wild type PV replication. HeLa cells in 96-well plates were infected with wild type PV at an

[0057] MOI=0.05 for 30 minutes. All ribozymes contained 4P═S in (B). Plaque forming units (pfu)/ml are shown as the mean of triplicate samples+standard deviation (S.D.).

[0058] FIG. 7 is a schematic representation of various hammerhead ribozyme. constructs targeted against HCV RNA.

[0059] FIG. 8 is a graph demonstrating the effect of site 183 ribozyme treatment on a single round of HCV-PV infection. HeLa cells were infected with HCV-PV at an MOI=5 for 30 minutes prior to treatment with ribozymes or control. Cells were lysed after 6, 7, or 8 hours and virus was quantified by plaque assay. Ribozyme binding arm/stem II formats (7/4, 7/3, 6/4, 6/3) and scrambled control (SAC, 7/4 format) are indicated. All contained 4P═S stabilization. Results in pfu/ml are shown as the median of duplicate samples±range.

[0060] FIG. 9 shows the secondary structure models of three ribozyme motifs described in this application.

[0061] FIG. 10 shows the activity of anti-HCV ribozymes in combination with Interferon. Results in pfu/ml are shown as the median of duplicate samples±range. BAC, binding attenuated control molecule; IF, interferon; Rz, hammerhead ribozyme targeted to HCV site 183; pfu, plaque forming unit.

[0062] Ribozymes

[0063] Seven basic varieties of naturally-occurring enzymatic RNAs are known presently. In addition, several in vitro selection (evolution) strategies (Orgel, 1979, Proc. R. Soc. London, B 205, 435) have been used to evolve new nucleic acid catalysts capable of catalyzing cleavage and ligation of phosphodiester linkages (Joyce, 1989, Gene, 82, 83-87; Beaudry et al., 1992, Science 257, 635-641; Joyce, 1992, Scientific American 267, 90-97; Breaker et al., 1994, TIBTECH 12, 268; Bartel et al., 1993, Science 25 261:1411-1418; Szostak, 1993, TIBS 17, 89-93; Kumar et al., 1995, FASEB J, 9, 1183; Breaker, 1996, Curr. Op. Biotech., 7, 442; Santoro et al., 1997, Proc. Natl. Acad Sci., 94, 4262; Tang et al., 1997, RNA 3, 914; Nakamaye & Eckstein, 1994, supra; Long & Uhlenbeck, 1994, supra; Ishizaka et al., 1995, supra; Vaish et al., 1997, Biochemistry 36, 6495; all of these are incorporated by reference herein). Each can catalyze a series of reactions including the hydrolysis of phosphodiester bonds in trans (and thus can cleave other RNA molecules) under physiological conditions. Table I summarizes some of the characteristics of solne of these ribozymes. In general, enzymatic nucleic acids act by first binding to a target RNA. Such binding occurs through the target binding portion of an enzymatic nucleic acid which is held in close proximity to an enzymatic portion of the molecule that acts to cleave the target RNA. Thus, the enzymatic nucleic acid first recognizes and then binds a target RNA through complementary base-pairing, and once bound to the correct site, acts enzymatically to cut the target RNA. Strategic cleavage of such a target RNA will destroy its ability to direct synthesis of an encoded protein. After an enzymatic nucleic acid has bound and cleaved its RNA target, it is released from that RNA to search for another target and can repeatedly bind and cleave new targets.

[0064] The enzymatic nature of a ribozyme is advantageous over other technologies, since the concentration of ribozyme necessary to affect a therapeutic treatment is lower. This advantage reflects the ability of the ribozyme to act enzymatically. Thus, a single ribozyme molecule is able to cleave many molecules of target RNA. In addition, the ribozyme is a highly specific inhibitor, with the specificity of inhibition depending not only on the base-pairing mechanism of binding to the target RNA, but also on the mechanism of target RNA cleavage. Single mismatches, or base-substitutions, near the site of cleavage can be chosen to completely eliminate catalytic activity of a ribozyme.

[0065] Nucleic acid molecules having an endonuclease enzymatic activity are able to repeatedly cleave other separate RNA molecules in a nucleotide base sequence-specific manner. Such enzymatic nucleic acid molecules can be targeted to virtually any RNA transcript, and efficient cleavage achieved in vitro (Zaug et al., 324, Nature 429 1986; Uhlenbeck, 1987 Nature 328, 596; Kim et al., 84 Proc. Natl. Acad. Sci. USA 8788, 1987; Dreyfus, 1988, Einstein Quart. J Bio. Med., 6, 92; Haseloff and Gerlach, 334 Nature 585, 1988; Cech, 260 JAMA 3030, 1988; and Jefferies et al., 17 Nucleic Acids Research 1371, 1989; Chartrand et al., 1995, Nucleic Acids Research 23, 4092; Santoro et al., 1997, PNAS 94,4262).

[0066] Because of their sequence-specificity, trans-cleaving ribozymes show promise as therapeutic agents for human disease (Usman & McSwiggen, 1995 Ann. Rep. Med. Chem. 30, 285-294; Christoffersen and Marr, 1995 J. Med. Chem. 38, 2023-2037). Ribozymes can be designed to cleave specific RNA targets within the background of cellular RNA. Such a cleavage event renders the RNA non-functional and abrogates protein expression from that RNA. In this manner, synthesis of a protein associated with a disease state can be selectively inhibited.

[0067] Ribozymes that cleave the specified sites in HCV RNAs represent a novel therapeutic approach to infection by the hepatitis C virus. Applicant indicates that ribozymes are able to inhibit the activity of HCV and that the catalytic activity of the ribozymes is required for their inhibitory effect. Those of ordinary skill in the art will find that it is clear from the examples described that other ribozymes that cleave HCV RNAs may be readily designed and are within the invention.

[0068] Target sites

[0069] Targets for useful ribozymes can be determined as disclosed in Draper et al., WO 93/23569; Sullivan et al., WO 93/23057; Thompson et al., WO 94/02595; Draper et al., WO 95/04818; McSwiggen et al., U.S. Pat. No. 5,525,468 and hereby incorporated by reference herein in totality. Rather than repeat the guidance provided in those documents here, below are provided specific examples of such methods, not limiting to those in the art. Ribozymes to such targets are designed as described in those applications and synthesized to be tested in vitro and in vivo, as also described. Such ribozymes can also be optimized and delivered as described therein.

[0070] The sequence of HCV RNAs were screened for optimal ribozyme target sites using a computer folding algorithm. Hammerhead or hairpin ribozyme cleavage sites were identified. These sites are shown in Tables IV-VIII (All sequences are 5′ to 3′ in the tables). The nucleotide base position is noted in the Tables as that site to be cleaved by the designated type of ribozyme. The nucleotide base position is noted in the Tables as that site to be cleaved by the designated type of ribozyme.

[0071] Because HCV RNAs are highly homologous in certain regions, some ribozyme target sites are also homologous (see Table IV and VIII). In this case, a single ribozyme will target different classes of HCV RNA. The advantage of one ribozyme that targets several classes of HCV RNA is clear, especially in cases where one or more of these RNAs may contribute to the disease state.

[0072] Hammerhead or hairpin ribozymes were designed that could bind and were individually analyzed by computer folding (Jaeger et al., 1989 Proc. Natl. Acad. Sci. USA, 86, 7706) to assess whether the ribozyme sequences fold into the appropriate secondary structure. Those ribozymes with unfavorable intramolecular interactions between the binding arms and the catalytic core are eliminated from consideration. Varying binding arm lengths can be chosen to optimize activity. Generally, at least 5 bases on each arm are able to bind to, or otherwise interact with, the target RNA. Ribozymes of the hammerhead or hairpin motif were designed to anneal to various sites in the mRNA message. The binding arms are complementary to the target site sequences described above.

[0073] Ribozyme Synthesis

[0074] Synthesis of nucleic acids greater than 100 nucleotides in length is difficult using automated methods, and the therapeutic cost of such molecules is prohibitive. In this invention, small nucleic acid motifs (e.g., hammerhead or the hairpin ribozymes) are used for exogenous delivery. The simple structure of these molecules increases the ability of the nucleic acid to invade targeted regions of the MRNA structure. However, these nucleic acid molecules can also be expressed within cells from eukaryotic promoters (e.g., Izant and Weintraub, 1985 Science 229, 345; McGarry and Lindquist, 1986 Proc. Natl. Acad. Sci. USA 83, 399; SullengerScanlon et al., 1991, Proc. Natl. Acad. Sci. USA, 88, 10591-5; Kashani-Sabet et al., 1992 Antisense Res. Dev., 2, 3-15; Dropulic et al., 1992 J. Virol, 66, 1432-41; Weerasinghe et al., 1991 J. Virol, 65, 5531-4; Ojwang et al., 1992 Proc. Natl. Acad Sci. USA 89, 10802-6; Chen et al., 1992 Nucleic Acids Res., 20, 4581-9; Sarver et al., 1990 Science 247, 1222-1225; Thompson et al., 1995 Nucleic Acids Res. 23, 2259). Those skilled in the art realize that any nucleic acid can be expressed in eukaryotic cells from the appropriate DNA/RNA vector. The activity of such nucleic acids can be augmented by their release from the primary transcript by a ribozyme (Draper et al., PCT W093/23569, and Sullivan et al., PCT W094/02595, both hereby incorporated in their totality by reference herein;

[0075] Ohkawa et al., 1992 Nucleic Acids Symp. Ser., 27, 15-6; Taira et al., 1991, Nucleic Acids Res., 19, 5125-30; Ventura et al., 1993 Nucleic Acids Res., 21, 3249-55; Chowrira et al., 1994 J. Biol. Chem. 269, 25856).

[0076] The ribozymes in the examples were chemically synthesized. The method of synthesis used follows the procedure for normal RNA synthesis as described in Usman et al., 1987 J. Am. Chem. Soc., 109, 7845; Scaringe et al., 1990 Nucleic Acids Res., 18, 5433; and Wincott et al., 1995 Nucleic Acids Res. 23, 2677-2684 and makes use of common nucleic acid protecting and coupling groups, such as dimethoxytrityl at the 5′-end, and phosphoramidites at the 3′-end. Small scale synthesis were conducted on a 394 Applied Biosystems, Inc. synthesizer using a modified 2.5 limol scale protocol with a 5 min coupling step for alkylsilyl protected nucleotides and 2.5 min coupling step for 2′-O-methylated nucleotides. Table II outlines the amounts, and the contact times, of the reagents used in the synthesis cycle. A 6.5-fold excess (163 μL of 0.1 M=16.3 μmol) of phosphoramidite and a 24-fold excess of S-ethyl tetrazole (238 AL of 0.25 M=59.5 μmol) relative to polymer-bound 5′-hydroxyl was used in each coupling cycle. Average coupling yields on the 394 Applied Biosystems, Inc. synthesizer, determined by colorimetric quantitation of the trityl fractions, were 97.5-99%. Other oligonucleotide synthesis reagents for the 394 Applied Biosystems, Inc. synthesizer : detritylation solution was 2% TCA in methylene chloride (ABI); capping was performed with 16% N-methyl imidazole in THF (ABI) and 10% acetic anhydride/10% 2,6-lutidine in THF (ABI); oxidation solution was 16.9 mM I2, 49 mM pyridine, 9% water in THF (Millipore). B & J Synthesis Grade acetonitrile was used directly from the reagent bottle. S-Ethyl tetrazole solution (0.25 M in acetonitrile) was made up from the solid obtained from American International Chemical, Inc.

[0077] Deprotection of the RNA was performed as follows. The polymer-bound oligoribonucleotide, trityl-off, was transferred from the synthesis column to a 4 mL glass screw top vial and suspended in a solution of methylamine (MA) at 65° C. for 10 min. After cooling to −20° C., the supernatant was removed from the polymer support. The support was washed three times with 1.0 InL of EtOH:MeCN:H₂O/3:1:1, vortexed and the supernatant was then added to the first supernatant. The combined supernatants, containing the oligoribonucleotide, were dried to a white powder.

[0078] The base-deprotected oligoribonucleotide was resuspended in anhydrous TEA.HF/NMP solution (250 gL of a solution of 1.5mL N-methylpyrrolidinone, 750 μL TEA and 1.0 mL TEA-3HF to provide a 1.4M HF concentration) and heated to 65° C. for 1.5 h. The resulting, fully deprotected, oligomer was quenched with 50 mM TEAB (9 mL) prior to anion exchange desalting.

[0079] For anion exchange desalting of the deprotected oligomer, the TEAB solution was loaded onto a Qiagen 500® anion exchange cartridge (Qiagen Inc.) that was prewashed with 50 mM TEAB (10 mL). After washing the loaded cartridge with 50 mM TEAB (10 mL), the RNA was eluted with 2 M TEAB (10 mL) and dried down to a white powder.

[0080] Inactive hammerhead ribozymes were synthesized by substituting switching the order of G₅A₆ and substituting a U for A₁₄(numbering from Hertel, K. J., et al, 1992, Nucleic Acids Res., 20, 3252). Inactive ribozymes were may also by synthesized by substituting a U for G5 and a U for A14. In some cases, the sequence of the substrate binding arms were randomized while the overall base composition was maintained.

[0081] The average stepwise coupling yields were>98% (Wincott et al., 1995 Nucleic Acids Res. 23, 2677-2684).

[0082] Hairpin ribozymes are synthesized in two parts and annealed to reconstruct the active ribozyme (Chowrira and Burke, 1992 Nucleic Acids Res., 20, 2835-2840). Ribozymes are also synthesized from DNA templates using bacteriophage T7 RNA polymerase (Milligan and Uhlenbeck, 1989, Methods Enzymol. 180, 51).

[0083] Ribozymes are modified to enhance stability and/or enhance catalytic activity by modification with nuclease resistant groups, for example, 2′-amino, 2′-C-allyl, 2′-flouro, 2′-O-methyl, 2′-H, nucleotide base modifications (for a review see Usman and Cedergren, 1992 TIBS 17, 34; Usman et al., 1994 Nucleic Acids Symp. Ser. 31, 163; Burgin et al. 1996 Biochemistry 6, 14090).

[0084] Ribozymes were purified by gel electrophoresis using general methods or are purified by high pressure liquid chromatography (HPLC; See Stinchcomb et al., International PCT Publication No. WO 95/23225, the totality of which is hereby incorporated herein by reference) and are resuspended in water.

[0085] The sequences of the ribozymes that are chemically synthesized, useful in this study, are shown in Tables IV-IX. Those in the art will recognize that these sequences are representative only of many more such sequences where the enzymatic portion of the ribozyme (all but the binding arms) is altered to affect activity. For example, stem-loop II sequence of hammerhead ribozymes can be altered (substitution, deletion, and/or insertion) to contain any sequences provided a minimum of two base-paired stem structure can form. Similarly, stem-loop IV sequence of hairpin ribozymes, can be altered (substitution, deletion, and/or insertion) to contain any sequence, provided a minimum of two base-paired stem structure can form. Preferably, no more than 200 bases are inserted at these locations. The sequences listed in Tables IV-IX may be formed of ribonucleotides or other nucleotides or non-nucleotides. Such ribozymes (which have enzymatic activity) are equivalent to the ribozymes described specifically in the Tables.

[0086] Optimizing Ribozyme Activity

[0087] Catalytic activity of the ribozymes described in the instant invention can be optimized as described by Draper et al., supra. The details will not be repeated here, but include altering the length of the ribozyme binding arms, or chemically synthesizing ribozymes with modifications (base, sugar and/or phosphate) that prevent their degradation by serum ribonucleases and/or enhance their enzymatic activity (see e.g., Eckstein et al., International Publication No. WO 92/07065; Perrault et al., 1990 Nature 344, 565; Pieken et al., 1991 Science 253, 314; Usman and Cedergren, 1992 Trends in Biochem. Sci. 17, 334; Usman et al., International Publication No. WO 93/15187; and Rossi et al., International Publication No. WO 91/03162; Sproat, U.S. Pat. No. 5,334,711; and Burgin et al., supra; all of these describe various chemical modifications that can be made to the base, phosphate and/or sugar moieties of enzymatic RNA molecules). Modifications which enhance their efficacy in cells, and removal of bases from stem loop structures to shorten RNA synthesis times and reduce chemical requirements are desired. (All these publications are hereby incorporated by reference herein).

[0088] There are several examples in the art describing sugar and phosphate modifications that can be introduced into enzymatic nucleic acid molecules without significantly effecting catalysis and with significant enhancement in their nuclease stability and efficacy. Ribozymes are modified to enhance stability and/or enhance catalytic activity by modification with nuclease resistant groups, for example, 2′-amino, 2′-C-allyl, 2′-flouro, 2′-O-methyl, 2′-H, nucleotide base modifications (for a review see Usman and Cedergren, 1992 TIBS 17, 34; Usman et al. 1994 Nucleic Acids Symp. Ser. 31, 163; Burgin et al., 1996 Biochemistry 35, 14090). Sugar modification of enzymatic nucleic acid molecules have been extensively described in the art (see Eckstein et al., International Publication PCT No. WO 92/07065; Perrault et al. Nature 1990, 344, 565-568; Pieken et al. Science 1991, 253, 314-317; Usman and Cedergren, Trends in Biochem. Sci 1992, 17, 334-339; Usman et al. International Publication PCT No. WO 93/15187; Sproat, U.S. Pat. No. 5,334,711 and Beigelman et al., 1995 J. Biol. Chem. 270, 25702; all of the references are hereby incorporated in their totality by reference herein). Such publications describe general methods and strategies to determine the location of incorporation of sugar, base and/or phosphate modifications and the like into ribozymes without inhibiting catalysis, and are incorporated by reference herein. In view of such teachings, similar modifications can be used as described herein to modify the nucleic acid catalysts of the instant invention.

[0089] Nucleic acid catalysts having chemical modifications which maintain or enhance enzymatic activity are provided. Such nucleic acid is also generally more resistant to nucleases than unmodified nucleic acid. Thus, in a cell and/or in vivo the activity may not be significantly lowered. As exemplified herein such ribozymes are useful in a cell and/or in vivo even if activity over all is reduced 10 fold (Burgin et al., 1996, Biochemistry, 35, 14090). Such ribozymes herein are said to “maintain” the enzymatic activity on all RNA ribozyme.

[0090] Therapeutic ribozymes delivered exogenously must optimally be stable within cells until translation of the target RNA has been inhibited long enough to reduce the levels of the undesirable protein. This period of time varies between hours to days depending upon the disease state. Clearly, ribozymes must be resistant to nucleases in order to function as effective intracellular therapeutic agents. Improvements in the chemical synthesis of RNA (Wincott et al., 1995 Nucleic Acids Res. 23, 2677; incorporated by reference herein) have expanded the ability to modify ribozymes by introducing nucleotide modifications to enhance their nuclease stability as described above.

[0091] By “nucleotide” as used herein is as recognized in the art to include natural bases (standard), and modified bases well known in the art. Such bases are generally located at the 1′ position of a sugar moiety. Nucleotide generally comprise a base, sugar and a phosphate group. The nucleotides can be unmodified or modified at the sugar, phosphate and/or base moiety, (also referred to interchangeably as nucleotide analogs, modified nucleotides, non-natural nucleotides, non-standard nucleotides and other ; see for example, Usman and McSwiggen, supra; Eckstein et al., International PCT Publication No. WO 92/07065; Usman et al., International PCT Publication No. WO 93/15187; all hereby incorporated by reference herein). There are several examples of modified nucleic acid bases known in the art and has recently been summarized by Limbach et al., 1994, Nucleic Acids Res. 22, 2183. Some of the non-limiting examples of base modifications that can be introduced into enzymatic nucleic acids without significantly effecting their catalytic activity include, inosine, purine, pyridin-4-one, pyridin-2-one, phenyl, pseudouracil, 2, 4, 6-trimethoxy benzene, 3-methyl uracil, dihydrouridine, naphthyl, aminophenyl, 5-alkylcytidines (e.g., 5-methylcytidine), 5-alkyluridines (e.g., ribothymidine), 5-halouridine (e.g., 5-bromouridine) or 6-azapyrimidines or 6-alkylpyrimidines (e.g. 6-methyluridine) and others (Burgin et al., 1996, Biochemistry, 35, 14090). By “modified bases” in this aspect is meant nucleotide bases other than adenine, guanine, cytosine and uracil at 1′ position or their equivalents; such bases may be used within the catalytic core of the enzyme and/or in the substrate-binding regions.

[0092] By “abasic” is meant sugar moieties lacking a base or having other chemical groups in place of base at the 1′ position.

[0093] By “unmodified nucleoside” is meant one of the bases adenine, cytosine, guanine, uracil joined to the 1′ carbon of beta-D-ribo-furanose.

[0094] By “modified nucleoside” is meant any nucleotide base which contains a modification in the chemical structure of an unmodified nucleotide base, sugar and/or phosphate.

[0095] Various modifications to ribozyme structure can be made to enhance the utility of ribozymes. Such modifications will enhance shelf-life, half-life in vitro, stability, and ease of introduction of such ribozymes to the target site, e.g., to enhance penetration of cellular membranes, and confer the ability to recognize and bind to targeted cells.

[0096] Administration of Ribozymes

[0097] Sullivan et al., PCT WO 94/02595, describes the general methods for delivery of enzymatic RNA molecules . Ribozymes may be administered to cells by a variety of methods known to those familiar to the art, including, but not restricted to, encapsulation in liposomes, by iontophoresis, or by incorporation into other vehicles, such as hydrogels, cyclodextrins, biodegradable nanocapsules, and bioadhesive microspheres. For some indications, ribozymes may be directly delivered ex vivo to cells or tissues with or without the aforementioned vehicles. Alternatively, the RNA/vehicle combination is locally delivered by direct injection or by use of a catheter, infusion pump or stent. Other routes of delivery include, but are not limited to, intravascular, intramuscular, subcutaneous or joint injection, aerosol inhalation, oral (tablet or pill form), topical, systemic, ocular, intraperitoneal and/or intrathecal delivery. More detailed descriptions of ribozyme delivery and administration are provided in Sullivan et al., supra and Draper et al, PCT W093/23569 which have been incorporated by reference herein.

[0098] The molecules of the instant invention can be used as pharmaceutical agents. Pharmaceutical agents prevent, inhibit the occurrence, or treat (alleviate a symptom to some extent, preferably all of the symptoms) of a disease state in a patient.

[0099] The negatively charged polynucleotides of the invention can be administered (e.g., RNA, DNA or protein) and introduced into a patient by any standard means, with or without stabilizers, buffers, and the like, to form a pharmaceutical composition. When it is desired to use a lipid or liposome delivery mechanism, standard protocols for formulation can be followed. The compositions of the present invention may also be formulated and used as tablets, capsules or elixirs for oral administration; suppositories for rectal administration; sterile solutions; suspensions for injectable administration; and the like.

[0100] The present invention also includes pharmaceutically acceptable formulations of the compounds described. These formulations include salts of the above compounds, e.g., acid addition salts, for example, salts of hydrochloric, hydrobromic, acetic acid, and benzene sulfonic acid.

[0101] A pharmacological composition or formulation refers to a composition or formulation in a form suitable for administration, e.g., systemic administration, into a cell or patient, preferably a human. Suitable forms, in part, depend upon the use or the route of entry, for example oral, transdermal, or by injection. Such forms should not prevent the composition or formulation to reach a target cell (i.e., a cell to which the negatively charged polymer is desired to be delivered to). For example, pharmacological compositions injected into the blood stream should be soluble. Other factors are known in the art, and include considerations such as toxicity and forms which prevent the composition or formulation from exerting its effect.

[0102] By “systemic administration” is meant in vivo systemic absorption or accumulation of drugs in the blood stream followed by distribution throughout the entire body. Administration routes which lead to systemic absorption include, without limitations: intravenous, subcutaneous, intraperitoneal, inhalation, oral, intrapulmonary and intramuscular. Each of these administration routes expose the desired negatively charged polymers, e.g., nucleic acids, to an accessible diseased tissue. The rate of entry of a drug into the circulation has been shown to be a function of molecular weight or size. The use of a liposome or other drug carrier comprising the compounds of the instant invention can potentially localize the drug, for example, in certain tissue types, such as the tissues of the reticular endothelial system (RES). A liposome formulation which can facilitate the association of drug with the surface of cells, such as, lymphocytes and macrophages is also useful. This approach may provide enhanced delivery of the drug to target cells by taking advantage of the specificity of macrophage and lymphocyte immune recognition of abnormal cells, such as the HCV infected liver cells.

[0103] The invention also features the use of a composition comprising surface-modified liposomes containing poly (ethylene glycol) lipids (PEG-modified, or long-circulating liposomes or stealth liposomes). These formulations offer an method for increasing the accumulation of drugs in target tissues. This class of drug carriers resists opsonization and elimination by the mononuclear phagocytic system (MPS or RES), thereby enabling longer blood circulation times and enhanced tissue exposure for the encapsulated drug (Lasic et al. Chem. Rev. 1995, 95, 2601-2627; Ishiwataet al., Chem. Pharm. Bull. 1995, 43, 1005-1011 ). Such liposomes have been shown to accumulate selectively in tumors, presumably by extravasation and capture in the neovascularized target tissues (Lasic et al., Science 1995, 267, 1275-1276; Oku et al., 1995, Biochim. Biophys. Acta, 1238, 86-90). The long-circulating liposomes enhance the pharmacokinetics and pharmacodynamics of DNA and RNA, particularly compared to conventional cationic liposomes which are known to accumulate in tissues of the MPS (Liu et al., J. Biol. Chem. 1995, 42, 24864-24870; Choi et al., International PCT Publication No. WO 96/10391; Ansell et al., International PCT Publication No. WO 96/10390; Holland et al., International PCT Publication No. WO 96/10392; all of these are incorporated by reference herein). All of these references are incorporated by reference herein.

[0104] In addition other cationic molecules may also be utilized to deliver the molecules of the present invention. For example, ribozymes may be conjugated to glycosylated poly(L-lysine) which has been shown to enhance localization of antisense oligonucleotides into the liver (Nakazono et al., 1996, Hepatology 23, 1297-1303; Nahato et al., 1997, Biochem Pharm. 53, 887-895). Glycosylated poly(L-lysine) may be covently attached to the enzymatic nucleic acid or be bound to enzymatic nucleic acid through electrostatic interaction.

[0105] The present invention also includes compositions prepared for storage or administration which include a pharmaceutically effective amount of the desired compounds in a pharmaceutically acceptable carrier or diluent. Acceptable carriers or diluents for therapeutic use are well known in the pharmaceutical art, and are described, for example, in Remington's Pharmaceutical Sciences, Mack Publishing Co. (A.R. Gennaro edit. 1985) hereby incorporated by reference herein. For example, preservatives, stabilizers, dyes and flavoring agents may be provided. Id. at 1449. These include sodium benzoate, sorbic acid and esters of p-hydroxybenzoic acid. In addition, antioxidants and suspending agents may be used.

[0106] A pharmaceutically effective dose is that dose required to prevent, inhibit the occurrence, or treat (alleviate a symptom to some extent, preferably all of the symptoms) a disease state. The pharmaceutically effective dose depends on the type of disease, the composition used, the route of administration, the type of mammal being treated, the physical characteristics of the specific mammal under consideration, concurrent medication, and other factors which those skilled in the medical arts will recognize. Generally, an amount between 0.1 mg/kg and 100 mg/kg body weight/day of active ingredients is administered dependent upon potency of the negatively charged polymer.

[0107] Alternatively, the enzymatic nucleic acid molecules of the instant invention can be expressed within cells from eukaryotic promoters (e.g., Izant and Weintraub, 1985 Science 229, 345; McGarry and Lindquist, 1986 Proc. Natl. Acad. Sci. USA 83, 399;

[0108] Scanlon et al., 1991, Proc. Natl. Acad. Sci USA, 88, 10591-5; Kashani-Sabet et al., 1992 Antisense Res. Dev., 2, 3-15; Dropulic et al., 1992 J. Virol, 66, 1432-41; Weerasinghe et al., 1991 J. Virol, 65, 5531-4; Ojwang et al., 1992 Proc. Natl. Acad. Sci. USA 89, 10802-6; Chen et al, 1992 Nucleic Acids Res., 20, 4581-9; Sarver et al.., 1990 Science 247, 1222-1225; Thompson et al. 1995 Nucleic Acids Res. 23, 2259; Good et al., 1997, Gene Therapy, 4, 45; all of the references are hereby incorporated in their totality by reference herein). Those skilled in the art realize that any nucleic acid can be expressed in eukaryotic cells from the appropriate DNA/RNA vector. The activity of such nucleic acids can be augmented by their release from the primary transcript by a ribozyme (Draper et al., PCT WO 93/23569, and Sullivan et al. PCT WO 94/02595; Ohkawa et al., 1992 Nucleic Acids Symp. Ser., 27, 15-6; Taira et al., 1991, Nucleic Acids Res., 19, 5125-30; Ventura et al., 1993 Nucleic Acids Res., 21, 3249-55; Chowrira et al. 1994 J. Biol. Chem. 269, 25856; all of the references are hereby incorporated in their totality by reference herein).

[0109] In another aspect of the invention, enzymatic nucleic acid molecules that cleave target molecules are expressed from transcription units (see for example Couture et al., 25 1996, TIG., 12, 510) inserted into DNA or RNA vectors. The recombinant vectors are preferably DNA plasmids or viral vectors. Ribozyme expressing viral vectors could be constructed based on, but not limited to, adeno-associated virus, retrovirus, adenovirus, or alphavirus. Preferably, the recombinant vectors capable of expressing the ribozymes are delivered as described above, and persist in target cells. Alternatively, viral vectors may be used that provide for transient expression of ribozymes. Such vectors might be repeatedly administered as necessary. Once expressed, the ribozymes cleave the target mRNA. The active ribozyme contains an enzymatic center or core equivalent to those in the examples, and binding arms able to bind target nucleic acid molecules such that cleavage at the target site occurs. Other sequences may be present which do not interfere with such cleavage. Delivery of ribozyme expressing vectors could be systemic, such as by intravenous or intramuscular administration, by administration to target cells ex-planted from the patient followed by reintroduction into the patient, or by any other means that would allow for introduction into the desired target cell (for a review see Couture et al, 1996, TIG., 12, 510).

[0110] In one aspect the invention features, an expression vector comprising nucleic acid sequence encoding at least one of the nucleic acid catalyst of the instant invention is disclosed. The nucleic acid sequence encoding the nucleic acid catalyst of the instant invention is operable linked in a manner which allows expression of that nucleic acid molecule.

[0111] In another aspect the invention features, the expression vector comprises: a transcription initiation region (e.g., eukaryotic pol I, II or III initiation region); b) a transcription termination region (e.g., eukaryotic pol I, II or III termination region); c) a gene encoding at least one of the nucleic acid catalyst of the instant invention; and wherein said gene is operably linked to said initiation region and said termination region, in a manner which allows expression and/or delivery of said nucleic acid molecule. The vector may optionally include an open reading frame (ORF) for a protein operably linked on the 5′ side or the 3′-side of the gene encoding the nucleic acid catalyst of the invention; and/or an intron (intervening sequences).

[0112] Transcription of the ribozyme sequences are driven from a promoter for eukaryotic RNA polymerase I (pol I), RNA polymerase II (pol II), or RNA polymerase III (pol III). Transcripts from pol II or pol III promoters will be expressed at high levels in all cells; the levels of a given pol II promoter in a given cell type will depend on the nature of the gene regulatory sequences (enhancers, silencers, etc.) present nearby. Prokaryotic RNA polymerase promoters are also used, providing that the prokaryotic RNA polymerase enzyme is expressed in the appropriate cells (Elroy-Stein and Moss, 1990 Proc. Natl. Acad. Sci USA, 87, 6743-7; Gao and Huang 1993 Nucleic Acids Res., 21, 2867-72; Lieber et al., 1993 Methods Enzymol., 217, 47-66; Zhou et al., 1990 Mol. Cell. Biol., 10, 4529-37). Several investigators have demonstrated that ribozymes expressed from such promoters can function in mammalian cells (e.g. Kashani-Sabet et al., 1992 Antisense Res. Dev., 2, 3-15; Ojwang et al., 1992 Proc. Natl. Acad. Sci. USA, 89, 10802-6; Chen etal., 1992 Nucleic Acids Res., 20,4581-9; Yu et al., 1993 Proc. Natl. Acad. Sci. U S A, 90, 6340-4; L'Huillier et al., 1992 EMBO J 11, 4411-8; Lisziewicz et al., 1993 Proc. Natl. Acad. Sci. U. S. A., 90, 8000-4; Thompson et al., 1995 Nucleic Acids Res. 23, 2259; Sullenger & Cech, 1993, Science, 262, 1566). More specifically, transcription units such as the ones derived from genes encoding U6 small nuclear (snRNA), transfer RNA (tRNA) and adenovirus VA RNA are useful in generating high concentrations of desired RNA molecules such as ribozymes in cells (Thompson et al., supra; Couture and Stinchcomb, 1996, supra; Noonberg et al., 1994, Nucleic Acid Res., 22, 2830; Noonberg et al., U.S. Pat. No. 5,624,803; Good et al. 1997, Gene Ther. 4, 45; Beigelman et al., International PCT Publication No. WO 96/18736; all of these publications are incorporated by reference herein. The above ribozyme transcription units can be incorporated into a variety of vectors for introduction into mammalian cells, including but not restricted to, plasmid DNA vectors, viral DNA vectors (such as adenovirus or adeno-associated virus vectors), or viral RNA vectors (such as retroviral or alphavirus vectors) (for a review see Couture and Stinchcomb, 1996, supra).

[0113] In yet another aspect the invention features an expression vector comprising nucleic acid sequence encoding at least one of the catalytic nucleic acid molecule of the invention, in a manner which allows expression of that nucleic acid molecule. The expression vector comprises in one embodiment; a) a transcription initiation region; b) a transcription termination region; c) a gene encoding at least one said nucleic acid molecule; and wherein said gene is operably linked to said initiation region and said termination region, in a manner which allows expression and/or delivery of said nucleic acid molecule. In another preferred embodiment the expression vector comprises: a) a transcription initiation region; b) a transcription termination region; c) an open reading frame; d) a gene encoding at least one said nucleic acid molecule, wherein said gene is operably linked to the 3′-end of said open reading frame; and wherein said gene is operably linked to said initiation region, said open reading frame and said termination region, in a manner which allows expression and/or delivery of said nucleic acid molecule. In yet another embodiment the expression vector comprises: a) a transcription initiation region; b) a transcription termination region; c) an intron; d) a gene encoding at least one said nucleic acid molecule; and wherein said gene is operably linked to said initiation region, said intron and said termination region, in a manner which allows expression and/or delivery of said nucleic acid molecule. In another embodiment, the expression vector comprises: a) a transcription initiation region; b) a transcription termination region; c) an intron; d) an open reading frame; e) a gene encoding at least one said nucleic acid molecule, wherein said gene is operably linked to the 3′-end of said open reading frame; and wherein said gene is operably linked to said initiation region, said intron, said open reading frame and said termination region, in a manner which allows expression and/or delivery of said nucleic acid molecule.

[0114] Interferons

[0115] Type I interferons (IFN) are a class of natural cytokines that includes a family of greater than 25 IFN-oA (Pesta, 1986, Methods Enzymol. 119, 3-14) as well as IFN-β, and IFN-ω). Although evolutionarily derived from the same gene (Diaz et al., 1994, Genomics 22, 540-552), there are many differences in the primary sequence of these molecules, implying an evolutionary divergence in biologic activity. All type I IFN share a common pattern of biologic effects that begin with binding of the IFN to the cell surface receptor (Pfeffer & Strulovici, 1992, Transmembrane secondary messengers for IFN-α/β. In: Interferon. Principles and Medical Applications., S. Baron, D. H. Coopenhaver, F. Dianzani, W. R. Fleischmann Jr., T. K. Hughes Jr., G. R. Kimpel, D. W. Niesel, G. J. Stanton, and S. K. Tyring, eds. 151-160). Binding is followed by activation of tyrosine kinases, including the Janus tyrosine kinases and the STAT proteins, which leads to the production of several IFN-stimulated gene products (Johnson et al., 1994, Sci. Am. 270, 68-75). The IFN-stimulated gene products are responsible for the pleotropic biologic effects of type I IFN, including antiviral, antiproliferative, and immunomodulatory effects, cytokine induction, and HLA class I and class II regulation (Pestka et al., 1987, Annu. Rev. Biochem 56, 727). Examples of IFN-stimulated gene products include 2-5-oligoadenylate synthetase (2-5 OAS), 32-microglobulin, neopterin, p68 kinases, and the Mx protein (Chebath & Revel, 1992, The 2-5 A system: 2-5 A synthetase, isospecies and functions. In: Interferon. Principles and Medical Applications. S. Baron, D. H. Coopenhaver, F. Dianzani, W. R. Jr. Fleischmann, T. K. Jr Hughes, G. R. Kimpel, D. W. Niesel, G. J. Stanton, and S. K. Tyring, eds., pp. 225-236; Samuel, 1992, The RNA-dependent P1/eIF-2α protein kinase. In: Interferon. Principles and Medical Applications. S. Baron, D. H. Coopenhaver, F. Dianzani, W. R. Fleischmann Jr., T. K. Hughes Jr., G. R. Kimpel, D. W. Niesel, G. H. Stanton, and S. K. Tyring, eds. 237-250; Horisberger, 1992, MX protein: function and Mechanism of Action. In: Interferon. Principles and Medical Applications. S. Baron, D. H. Coopenhaver, F. Dianzani, W.R. Fleischmann Jr., T. K. Hughes Jr., G. R. Kimpel, D. W. Niesel, G. H. Stanton, and S. K. Tyring, eds. 215-224). Although all type I IFN have similar biologic effects, not all the activities are shared by each type I IFN, and, in many cases, the extent of activity varies quite substantially for each IFN subtype (Fish et al, 1989, J Interferon Res. 9, 97-114; Ozes et al., 1992, J Interferon Res. 12, 55-59). More specifically, investigations into the properties of different subtypes of IFN-α and molecular hybrids of IFN-α have shown differences in pharmacologic properties (Rubinstein, 1987, J Interferon Res. 7, 545-551). These pharmacologic differences may arise from as few as three amino acid residue changes (Lee et al., 1982, Cancer Res. 42, 1312-1316).

[0116] Eighty-five to 166 amino acids are conserved in the known IFN-α subtypes. Excluding the IFN-α pseudogenes, there are approximately 25 known distinct IFN-α subtypes. Pairwise comparisons of these nonallelic subtypes show primary sequence differences ranging from 2% to 23%. In addition to the naturally occurring IFNs, a non-natural recombinant type I interferon known as consensus interferon (CIFN) has been synthesize as a therapeutic compound (Tong et al., 1997, Hepatology 26, 747-754).

[0117] Interferon is currently in use for at least 12 different indications including infectious and autoimmune diseases and cancer (Borden, 1992, N. Engl. J Med. 326, 1491-1492). For autoimmune diseases IFN has been utilized for treatment of rheumatoid arthritis, multiple sclerosis, and Crohn's disease. For treatment of cancer IFN has been used alone or in combination with a number of different compounds. Specific types of cancers for which IFN has been used include squamous cell carcinomas, melanomas, hypernephromas, hemangiomas, hairy cell leukemia, and Kaposi's sarcoma. In the treatment of infectious diseases, IFNs increase the phagocytic activity of macrophages and cytotoxicity of lymphocytes and inhibits the propagation of cellular pathogens. Specific indications for which IFN has been used as treatment include: hepatitis B, human papillomavirus types 6 and 11 (i.e. genital warts) (Leventhal et al., 1991, N Engl J Med 325, 613-617), chronic granulomatous disease, and hepatitis C virus.

[0118] Numerous well controlled clinical trials using IFN-α alpha in the treatment of chronic HCV infection have demonstrated that treatment three times a week results in lowering of serum ALT values in approximately 50% (range 40% to 70%) of patients by the end of 6 months of therapy (Davis et al., 1989, The new England Journal of Medicine 321, 1501-1506; Marcellin et al., 1991, Hepatology 13, 393-397; Tong et al., 1997, Hepatology 26, 747-754; Tong et al., Hepatology 26, 1640-1645). However, following cessation of interferon treatment, approximately 50% of the responding patients relapsed, resulting in a “durable” response rate as assessed by normalization of serum ALT concentrations of approxyimately 20 to 25%. In addition, studies that have examined six months of type 1 interferon therapy using changes in HCV RNA values as a clinical endpoint have demonstrated that up to 35% of patients will have a loss of HCV RNA by the end of therapy (Tong et al., 1997, supra). However, as with the ALT endpoint, about 50% of the patients relapse six months following cessation of therapy resulting in a durable virologic response of only 12% (23). Studies that have examined 48 weeks of therapy have demonstrated that the sustained virological response is up to 25%

[0119] Ribozymes in combination with IFN have the potential to improve the effectiveness of treatment of HCV or any of the other indications discussed above. Ribozymes targeting RNAs associated with diseases such as infectious diseases, autoimmune disases, and cancer, can be used individually or in combination with other therapies such as IFN to achieve enhanced efficacy.

### EXAMPLES

[0120] The following are non-limiting examples showing the selection, isolation, synthesis and activity of enzymatic nucleic acids of the instant invention.

[0121] The following examples demonstrate the selection of ribozymes that cleave HCV RNA. The methods described herein represent a scheme by which ribozymes may be derived that cleave other RNA targets required for HCV replication.

### Example 1

### Identification of Potential Ribozyme Cleavage Sites in HCV RNA

[0122] The sequence of HCV RNA was screened for accessible sites using a computer folding algorithm. Regions of the MRNA that did not form secondary folding structures and contained potential hammerhead and/or hairpin ribozyme cleavage sites were identified. The sequences of these cleavage sites are shown in tables IV-VIII.

### Example 2

### Selection of Ribozyme Cleavage Sites in HCV RNA

[0123] To test whether the sites predicted by the computer-based RNA folding algorithm corresponded to accessible sites in HCV RNA, 20 hammerhead sites were selected for analysis. Ribozyme target sites were chosen by analyzing genomic sequences of HCV (Input Sequence=HPCJTA (Acc#D11168 & D01171)) and prioritizing the sites on the basis of folding. Hammerhead ribozymes were designed that could bind each target (see FIG. 1) and were individually analyzed by computer folding (Christoffersen et al. 1994 J Mol Struc. Theochem, 311, 273; Jaeger et al., 1989, Proc. Natl. Acad. Sci. USA, 86, 7706) to assess whether the ribozyme sequences fold into the appropriate secondary structure. Those ribozymes with unfavorable intramolecular interactions between the binding arms and the catalytic core were eliminated from consideration. As noted below, varying binding arm lengths can be chosen to optimize activity. Generally, at least 5 bases on each arm are able to bind to, or otherwise interact with, the target RNA.

[0124] Selection of ribozyme candidates was initiated by scanning for all hammerhead cleavage sites in an HCV RNA sequence derived from a patient infected with HCV genotype 1b. The results of this sequence analysis are shown in Table III. As seen by Table III, 1300 hammerhead ribozyme sites were identified by this analysis. Next, in order to identify hammerhead ribozyme candidates that would cleave in the conserved regions of the HCV genome, a sequence alignment of approximately 50 HCV isolates from genotypes 1a, 1b, 2a, 2b, 2c, 3a, 3b, 4a, 5a, and 6 was completed. Within genotype sites were identified that are in areas having the greatest sequence identity between all isolates examined. This analysis reduced the hammerhead ribozyme candidates to about 23 (Table III).

[0125] Due to the high sequence variability of the HCV genome, selection of ribozymes for broad therapeutic applications should probably involve the conserved regions of the HCV genome. A list of the thirty-hamnmerhead ribozymes derived from the conserved regions (5′- Non-Coding Region (NCR), 5′- end of core protein coding region, and 3′-NCR) of the HCV genome is shown in Table IV. In general, ribozymes targeted to sites located in the 5′ terminal region of the HCV genome should block translation while ribozymes cleavage sites located in the 3′ terminal region of the genome should block RNA replication.

### Example 3

### Chemical Synthesis and Purification of Ribozymes

[0126] Ribozymes of the hammerhead or hairpin motif were designed to anneal to various sites in the RNA message. The binding arms are complementary to the target site sequences described above. The ribozymes were chemically synthesized. The method of synthesis used followed the procedure for normal RNA synthesis as described in Usman et al., (1987 J. Am. Chem. Soc., 109, 7845), Scaringe et al., (1990 Nucleic Acids Res., 18, 5433) and Wincott et al., supra, and made use of common nucleic acid protecting and coupling groups, such as dimethoxytrityl at the 5′-end, and phosphoramidites at the 3′-end. The average stepwise coupling yields were>98%.

[0127] Inactive hammerhead ribozymes were synthesized by substituting switching the order of G₅A₆ and substituting a U for A₁₄ (numbering from Hertel et al., 1992 Nucleic Acids Res., 20, 3252). Hairpin ribozymes were synthesized in two parts and annealed to reconstruct the active ribozyme (Chowrira and Burke, 1992 Nucleic Acids Res., 20, 2835-2840). Ribozymes were also synthesized from DNA templates using bacteriophage T7 RNA polymerase (Milligan and Uhlenbeck, 1989, Methods Enzymol. 180, 51). Ribozymes were modified to enhance stability by modification with nuclease resistant groups, for example, 2′-amino, 2′-C-allyl, 2′-flouro, 2′-O-methyl, 2′-H (for a review see Usman and Cedergren, 1992 TIBS 17, 34). Ribozymes were purified by gel electrophoresis using general methods or were purified by high pressure liquid chromatography (HPLC; See Wincott et al., supra; the totality of which is hereby incorporated herein by reference) and were resuspended in water. The sequences of the chemically synthesized ribozymes used in this study are shown below in Table IV -IX.

### Example 4

### Ribozyme Cleavage of HCV RNA Target in vitro

[0128] Ribozymes targeted to the HCV are designed and synthesized as described above. These ribozymes can be tested for cleavage activity in vitro, for example using the following procedure. The target sequences and the nucleotide location within the HCV are given in Table IV.

[0129] Cleavage Reactions: Full-length or partially full-length, internally-labeled target RNA for ribozyme cleavage assay is prepared by in vitro transcription in the presence of [α⁻³²p] CTP, passed over a G 50 Sephadex column by spin chromatography and used as substrate RNA without further purification. Alternately, substrates are 5′-³²P-end labeled using T4 polynucleotide kinase enzyme. Assays are performed by pre-warming a 2X concentration of purified ribozyme in ribozyme cleavage buffer (50 mM Tris-HCl, pH 7.5 at 37° C., 10 mM MgCl₂) and the cleavage reaction was initiated by adding the 2X ribozyme mix to an equal volume of substrate RNA (maximum of 1-5 nM) that was also pre-warmed in cleavage buffer. As an initial screen, assays are carried out for 1 hour at 37° C. using a final concentration of either 40 nM or 1 mM ribozyme, i.e., ribozyme excess. The reaction is quenched by the addition of an equal volume of 95% formamide, 20 mM EDTA, 0.05% bromophenol blue and 0.05% xylene cyanol after which the sample is heated to 95° C. for 2 minutes, quick chilled and loaded onto a denaturing polyacrylamide gel. Substrate RNA and the specific RNA cleavage products generated by ribozyme cleavage are visualized on an autoradiograph of the gel. The percentage of cleavage is determined by Phosphor Imager® quantitation of bands representing the intact substrate and the cleavage products.

### Example 5

### Ability of HCV Ribozymes to Cleave HCV RNA in Patient Serum

[0130] Ribozymes targeting sites in HCV RNA were synthesized using modifications that confer nuclease resistance (Beigelman, 1995, J. Biol. Chem. 270, 25702). It has been well documented that serum from chronic hepatitis C patients contains on average 3×10⁶ copies/ml of HCV RNA. To further select ribozyme product candidates, the 30 HCV specific ribozymes are characterized for HCV RNA cleavage activity utilizing HCV RNA isolated from the serum of genotype 1b HCV patients. The best candidates from the HCV genotype1b screen will be screened against isolates from the wide range of HCV genotypes including 1a, 1b, 2a, 2b, 2c, 3a, 3b, 4a, 5a, and 6. Therefore, it is possible to select ribozyme candidates for further development based on their ability to broadly cleave HCV RNA from a diverse range of HCV genotypes and quasispecies.

### Example 6

### Ribozyme Cleavage of Conserved HCV RNA Target Sites in vitro

[0131] There are three regions of the genome that are highly conserved, both within a genotype and across different genotypes. These conserved sequences occur in the 5′ and 3′ non-coding regions (NCRs) as well as the 5′-end of the Core Protein coding region. These regions are thought to be important for HCV RNA replication and translation. Thus, therapeutic agents that target these conserved HCV genornic regions may have a significant impact over a wide range of HCV genotypes. The presence of quasispecies, and the potential for infection with more than one genotype makes this a critical feature of an effective therapy. Moreover, it is unlikely that drug resistance will occur, since mutations that have been suggested to lead to drug resistance typically do not occur within these highly conserved regions. In order to target multiple genotypes and decrease the chance of developing drug resistance, Applicant has designed ribozymes that cleave in regions of identity within the conserved regions discussed above.

[0132] Sequence alignments were performed for the 5′ NCR, the 5′ end of the Core Protein coding region, and the 3′ NCR. For the 5′ NCR, 34 different isolates representing genotypes 1a, 1b, 2a, 2b, 2c, 3a, 3b, 4a, 4f, and 5a were aligned. The alignments included the sequences from nucleotide position 1 to nucleotide position 350 (18 nucleotides downstream of the initiator ATG codon), using the reported sequence “HPCKlSI” as the reference for numbering. For the Core Protein coding region, 44 different isolates representing genotypes 1a, 1b, 2a, 2b, 2c, 3a, 3b, 4a, 4c, 4f, 5a, and 6a were aligned. These alignments included 600 nucleotides, beginning 8 nucleotides upstream of the initiator ATG codon. As the reference for numbering, the reported sequence “HPCCOPR” was used, with the “C” eight nucleotides upstream of the initiator codon ATG designated as “I”. For the 3′ NCR region, 20 different isolates representing genotypes1b, 2a, 2b, 3a, and 3b were aligned. These alignments included sequences in the 3′ terminal 235 nucleotides of the genome, with the reported sequence “D855 16” used as the reference for numbering, and the 235h nucleotide from the 3′ end designated as “1”.

[0133] During analysis of the alignments of each region, each sequence was compared to the respective reference sequence (identified above), and regions of identity across all isolates were determined. All potential ribozyme sites were identified in the reference sequence. The highest priority for choosing ribozyme sites was that the site should have 100% identity across all isolates aligned, at every position in both the cleavage site and binding arms. Ribozyme sites that met these criteria were chosen. In addition, two specific allowances were made as follows. 1) If a potential ribozyme site had 100% sequence identity at all except one or two nucleotide positions, then the actual nucleotide at that position was examined in the isolate(s) that differed. If that nucleotide was such that a ribozyme designed to allow “G:U wobble” base-paring could function on all the isolates, then that site was chosen. 2) If a potential ribozyme site had 100% sequence identity at all except one or two nucleotide positions, then the genotype of the isolate which contained the differing nucleotide(s) was examined. If the genotype of the isolate that differed was of extremely rare prevalence, then that site was also chosen.

[0134] Ribozyme sites identified and referred to below use the following nomenclature: “region of the genome in which the site exists” followed by “nucleotide position 5′ to the cleavage site” (according to the reference sequence and numbering described above). For example, a ribozyme cleavage site at nucleotide position 67 in the 5′ NCR is designated “5-67”, and a ribozyme cleavage site at position 48 in the core coding region is designated “c48”.

[0135] A number of these ribozymes were screened in an in vitro HCV cleavage assay to select appropriate ribozyme candidates for cell culture studies. The ribozymes selected for screening targeted the 5′ UTR region that is necessary for HCV translation. These sites are all conserved among the 8 major HCV genotypes and 18 subtypes, and have a high degree of homology in every HCV isolate that was used in the analysis described above. HCV RNA of four different genotypes (1b, 2a, 4, and 5) were isolated from human patients and the 5′ HCV UTR and 5′ core region were amplified using RT-PCR. Run-off transcripts of the 5′ HCV UTR region (-750 nt transcripts) were prepared from the RT-PCR products, which contained a T7 promoter, using the T7 Megascript transcription kit and the manufacturers protocol (Ambion, Inc.). Unincorporated nucleotides are removed by spin column filtration on Bio-Gel P-60 resin (Bio-Rad). The filtered transcript was 5′ end labeled with ³²p using Polynucleotide Kinase (Boehringer/Mannheim) and 150μCi/μl Gamma-32P-ATP (NEN) using the enzyme manufacturer's protocol. The kinased transcript is spin purified again to remove unincorporated Gamma-32P-ATP and gel purified on 5% polyacrylamide gel.

[0136] Ribozymes targeting various sites from table IV were selected and tested on the 5′ HCV UTR transcript sequence to test the efficiency of RNA cleavage. 15 ribozymes were synthesized as previously described (Wincott et al., supra).

[0137] Assays were performed by pre-warming a 2X (2 μM ) concentration of purified ribozyme in ribozyme cleavage buffer (50 mM TRIS pH 7.5, 10 M MgCI₂, 10 units RNase Inhibitor (Boehringer/Mannheim), 10 mM DTT, 0.5 μg tRNA) and the cleavage reaction was initiated by adding the 2X ribozyme mix to an equal volume of substrate RNA (17.46 pmole final concentration) that was also pre-warmed in cleavage buffer. The assay was carried out for 24 hours at 37° C. using a fmal concentration of 1 μM ribozyme, iLe., ribozyme excess. The reaction was quenched by the addition of an equal volume of 95% formamide, 20 mM EDTA, 0.05% bromophenol blue and 0.05% xylene cyanol after which the sample is heated to 95° C. for 2 minutes, quick chilled and loaded onto a denaturing polyacrylamide gel. Substrate RNA and the specific RNA cleavage products generated by ribozyme cleavage are visualized on an autoradiograph of the gel. The percentage of cleavage is determined by Phosphor Imager® quantitation of bands representing the intact substrate and the cleavage products.

[0138] Observed cleavage fragment sizes from the gels are correlated to predicted fragment sizes by comparison to the RNA marker. The optical density of expected cleavage fragments are determined from the phosphorimage plates and ranked from highest density, indicating the most cleavage product, to lowest of each genotype of HCV transcript tested. The top 3 cleaving ribozymes (out of 15 ribozymes tested) are given ranking values of 5, the next 3 highest densities are given ranking values of 4, etc for every genotype tested. The ranking values for each ribozyme are averaged between the genotypes tested. Individual and average ribozyme ranking values are graphed and compared. The results (FIG. 2) demonstrate that many of these tested ribozymes are able to to give high levels of cleavage regardless of genotype. In particular, ribozymes targeting site HCV.5-258, HCV.5-294, HCV.5-313 (Sakamoto et al., J. Clinical Investigation 1996 98(12):2720-2728), and HCV.5-318 (table IV) appear to demonstrate a consistent pattern of RNA cleavage

### Example 7

### Inhibition of Luciferase Activity Using HCV Tarizeting Ribozymes in OST7 Cells

[0139] The capability of ribozymes to inhibit HCV RNA intracellularly was tested using a dual reporter system that utilizes both firefly and Renilla luciferase (FIG. 3). The ribozymes targeted to the 5′ HCV UTR region, which when cleaved, would prevent the translation of the transcript into luciferase. OST-7 cells were plated at 12,500 cells per well in black walled 96 well plates (Packard) in medium DMEM containing 10% fetal bovine serum, 1% pen/strep, and 1% L-glutamine and incubated at 37° C. overnight. A plasmid containing T7 promoter expressing 5′ HCV UTR and firefly luciferase (T7Cl-341 (Wang etal., 1993, J. of Virol. 67, 3338-3344)) was mixed with a pRLSV40 Renilla control plasmid (Promega Corporation) followed by ribozyme, and cationic lipid to make a 5X concentration of the reagents (T7C1-341 (4 gg/ml), pRLSV40 renilla luciferase control (6 μg/ml), ribozyme (250 nM), transfection reagent (28.5 μg/ml).

[0140] The complex mixture was incubated at 37° C. for 20 minutes. The media was removed from the cells and 120 μl of Opti-mem media was added to the well followed by 30 μt of the 5X complex mixture. 150 μl of Opti-mem was added to the wells holding the untreated cells. The complex mixture was incubated on OST-7 cells for 4 hours, lysed with passive lysis buffer (Promega Corporation) and luminescent signals were quantified using the Dual Luciferase Assay Kit using the manufacturer's protocol (Promega Corporation). The ribozyme sequences used are given in table IV. The ribozymes used were of the hammerhead motif. The hammerhead ribozymes were chemically modified such that the ribozyme consists of ribose residues at five positions (see for example FIG. 7); position 4 has either 2′-C-allyl or 2′-amino modification; position 7 has either 2′-amnino modification or 2-O-methyl modification; the remaining nucleotide positions contain 2′-O-methyl substitutions; four nucleotides at the 5′ terminus contains phosphorothioate substitutions. Additionally, the 3′ end of the ribozyme includes a 3′-3′ linked inverted abasic moiety (abasic deoxyribose; iH). The data (FIG. 4) is given as a ratio between the firefly and Renilla luciferase fluorescence. All of the ribozymes targeting 5′ HCV UTR were able to reduce firefly luciferase signal relative to renilla luciferase.

### Example 9

### Ribozyme Mediated Inhibition of Luciferase Activity Compared to its Inactive Control in OST-7 Cells

[0141] The dual reporter system described above was utilized to determine the level of reduction of luciferase activity mediated by a ribozyme compared to its inactive control. Ribozymes, having the chemical composition described in the previous example, to sites HCV 313 and 318 (table IV) and their inactive controls were synthesized as above. The inactive control has the same nucleotide base composition as the active ribozyme but the nucleotide sequence has been scrambled. The protocols utilized for tissue culture and the luciferase assay was exactly as given in example 8 except the ribozyme concentration in the 5X complex mixture was 1 mM (final concentration on the cells was 200 nM).

[0142] The results are given in FIG. 5. The ribozyme targeting HCV.5-3 18 was able to greatly reduce firefly luciferase activity compared to the untreated and inactive controls. The ribozyme targeting HCV.5-313 was able to slightly reduce firefly luciferase activity compared to the inactive control.

### Example 10:

### Ribozyme Inhibition of Viral Replication

[0143] During HCV infection, viral RNA is present as a potential target for ribozyme cleavage at several processes: uncoating, translation, RNA replication and packaging. Target RNA may be more or less accessible to ribozyme cleavage at any one of these steps. Although the association between the HCV initial ribosome entry site (IRES) and the translation apparatus is mimicked in the HCV 5′ UTR/luciferase reporter system (example 9), these other viral processes are not represented in the OST7 system. The resulting RNA/protein complexes associated with the target viral RNA are also absent. Moreover, these processes may be coupled in an HCV-infected cell which could further impact target RNA accessibility. Therefore, we tested whether ribozymes designed to cleave the HCV 5′ UTR could effect a replicating viral system.

[0144] Recently, Lu and Wimmer characterized an HCV-poliovirus chimera in which the poliovirus IRES was replaced by the IRES from HCV (Lu & Wimmer, 1996, Proc. Natl. Acad. Sci. USA. 93, 1412-1417). Poliovirus (PV) is a positive strand RNA virus like HCV, but unlike HCV is non-enveloped and replicates efficiently in cell culture. The HCV-PV chimera expresses a stable, small plaque phenotype relative to wild type PV.

[0145] The following ribozymes were synthesized for the experiment (table VIII): ribozyme targeting site 183 (3 5′-end phosphorothioate linkages), scrambled control to site 183, ribozyme to site 318 (3 5′-end phosphorothioate linkages), ribozyme targeting site 183 (4 5′-end phosphorothioate linkages), inactive ribozyme targeting site 183 (4 5′-end phosphorothioate linkages). HeLa cells were infected with the HCV-PV chimera for 30 minutes and immediately treated with ribozyme. HeLa cells were seeded in U-bottom 96-well plates at a density of 9000-10,000 cells/well and incubated at 37° C. under 5% CO₂ for 24 h. Transfection of ribozyme (200 nM) was achieved by mixing of 10X ribozyme (2000 nM) and 10X of a cationic lipid (80μpg/ml) in DMEM (Gibco BRL) with 5% fetal bovine serum (FBS). Ribozyme/lipid complexes were allowed to incubate for 15 minutes at 37° C. under 5% CO₂. Medium was aspirated from cells and replaced with 80 μs of DMEM (Gibco BRL) with 5% FBS serum, followed by the addition of 20 μls of 10X complexes. Cells were incubated with complexes for 24 hours at 37° C. under 5% CO₂.

[0146] The yield of HCV-PV from treated cells (FIG. 6A) was quantified by plaque assay. The plaque assays were performed by diluting virus samples in serum-free DMEM (Gibco BRL) and applying 100 μl to HeLa cell monolayers (˜80% confluent) in 6-well plates for 30 minutes. Infected monolayers were overlayed with 3 ml 1.2% agar (Sigma) and incubated at 37° C. under 5% CO₂. Two-three days later the overlay was removed, monolayers were stained with 1.2% crystal violet, and plaque forming units were counted. The data is shown in FIG. 6A. Ribozymes to site 183 inhibited HCV-PV replication by>80% (P<0.05) compared to the scrambled control (FIG. 6A, first two bars). In addition, 3 or 4 phosphorothioate stabilization was equally effective (P<0.05 vs. control for each) in inhibiting viral replication (compare 1st and 4th bar in FIG. 6A). Ribozymes to the 318 site also had a statistically significant (P<0.05), effect on viral replication (compare ₂nd and ₃rd bar in FIG. 6A).

[0147] To confirm that a ribozyme cleavage mechanism was responsible for the inhibition of HCV-PV replication observed, HCV-PV infected cells were treated with ribozymes to site 183 that maintained binding arm sequences but contained a mutation in the catalytic core to attenuate cleavage activity (Table I). Viral replication in these cells was not inhibited compared to cells treated with the scrambled control ribozyme (FIG. 6A, ₄th and ₅th bar), indicating that ribozyme cleavage activity was required for the inhibition of HCV-PV replication observed. In addition, ribozymes targeting site 183 of the HCV 5′ UTR had no effect on wild type PV replication (FIG. 6B). These data provide evidence that the ribozyme-mediated inhibition of HCV-PV replication was dependent upon the HCV 5′ UTR and not a general inhibition of PV replication.

[0148] Ribozymes to site 183 were also tested for the ability to inhibit HCV-PV replication during a single infectious cycle in HeLa cells (FIG. 8). Cells treated with ribozyme to site 183 (7/4 format) produced significantly less virus than cells treated with the scrambled control (>80% inhibition at 8h post infection, P <0.001).

### Example 11

### Shortening of Ribozyme Lengths

[0149] All the ribozymes described in example I0 above contained 7 nucleotides on each binding arms and contained a 4 base-paired stem II element (7/4 format). For pharmaceutical manufacture of a therapeutic ribozyme it is advantageous to minimize sequence length if possible. Thus ribozymes to site 183 were shortened by removing the outer most nucleotide from each binding arm such that the ribozyme has six nucleotides in each binding arm and the stem II region is four base-paired long (6/4 format); removing one base-pair (2 nucleotides) in stem II resulting in a 3 base-paired stem II (7/3 format); or removing one nucleotide from each binding arm and shortening the stem II by one base-pair (6/3 format) (See FIG. 7 for a schematic representation of each of these ribozymes. Ribozymes in all tested formats gave significant inhibition of viral replication (FIG. 8) with the 7/4, 7/3 and 6/3 formats being almost identical at the 8h timepoint (P<0.001 across time course for all formats). The shortest ribozyme tested (6/3 format) was slightly more efficacious (>90% inhibition, P<0.001) than the 7/4 ribozyme (˜80% inhibition, P<0.001). The 6/3 ribozyme may have a greater ability to access site 183 in the HCV-PV chimera.

### Example 12

### Combination Therapy of HCV Ribozymes and Interferon

[0150] HeLa cells (10,000 cells per well) were pre-treated with 12.5 Units/ml of Interferon alpha in complete media (DMEM+5% FBS) or pre-treated with complete media alone for 4 hours and then infected with HCV-PV at an MOI=0.1 for 30 minutes. The viral inoculum was then removed and 200 nM ribozyme targeted to HCV site 183 (Rz) or binding attenuated control, which has mutations in the catalytic core of the ribozyme that severely attenuates the activity of the ribozyme, (BAC) was delivered using cationic lipid in complete media for 24 hours. After 24 hours, the cells were lysed three times by freeze/thaw to release virus and virus was quantified by plaque assay. Viral yield is shown as mean plaque forming units per ml (pfu/ml)+SEM. The data is shown in FIG. 10.

[0151] Pre-treatment with interferon (IFN) reduces the viral yield by ˜10⁻¹ in control treated cells (BAC+IFN versus BAC). Ribozyme treated cells produce 2×10⁻¹ less virus than control-treated cells (Rz versus BAC). The combination of Rz and IFN treatment results in a synergistic 4×10⁻² reduction in viral yield (Rz+IFN versus BAC). An additive effect would result in only a 3×10⁻¹ reduction (1×10^{-1+2×10}⁻¹).

### Example 13

### Inhibition of Hepatitis C virus Usingz other Ribozyme Motifs

[0152] A number of varying ribozyme motifs (RPI motifs 1-3; FIG. 9), were tested for their ability to inhibit HCV propagation in tissue culture. An example of RPI motif I is described in Kore et al., 1998, Nucleic Acids Research 26, 4116-4120, while an example of RPI motif II is described in Ludwig & Sproat, International PCT Publication No. WO 98/58058). RPI motif III is a new ribozyme motif which applicant has recently developed and an example of this motif was tested herein.

[0153] OST7 cells were maintained in Dulbecco's modified Eagle's medium (GIBCO BRL) supplemented with 10% fetal calf serum, L-glutamine (2 mM) and penicillin/streptomycin. For transfections, OST7 cells were seeded in black-walled 96-well plates (Packard Instruments) at a density of 12,500 cells/well and incubated at 37° C. under 5% CO₂ for 24 hours. Co-transfection of target reporter HCVT7C (0.8 μg/ml), control reporter pRLSV40, (1.2 μg/ml) and ribozyme, 50-200 nM was achieved by the following method: a 5X mixture of HCVT7C (4 μg/ml), pRLSV40 (6 μg/ml), ribozyme (250-1000 nM) and cationic lipid (28.5 μg/ml) was made in 150 μls of OPTI-MEM (GIBCO BRL) minus serum. Reporter/ribozyme/lipid complexes were allowed to form for 20 minutes at 37° C. under 5% CO₂. Medium was aspirated from OST7 cells and replaced with 120 tls of OPTI-MEM (GIBCO BRL) minus serum, immediately followed by the addition of 30 μs of 5X reporter/ribozyme/lipid complexes. Cells were incubated with complexes for 4 hours at 37° C. under 5% CO₂. Luciferase assay was performed as described in example 7. The data is summarized in table IX, with each motif's results listed along with its control. All of the ribozyme motifs were able to reduce the amount of HCV produced by the cells compared to the irrelevant controls.

### CELL CULTURE ASSAYS

[0154] Although there have been reports of replication of HCV in cell culture (see below), these systems are difficult to replicate and have proven unreliable. Therefore, as was the case for development of other anti-HCV therapeutics such as interferon and ribavirin, after demonstration of safety in animal studies applicant can proceed directly into a clinical feasibility study.

[0155] Several recent reports have documented in vitro growth of HCV in human cell lines (Mizutani et al., Biochem Biophys Res Commun 1996 227(3):822-826; Tagawa et al., Journal of Gasteroenterology and Hepatology 1995 10(5):523-527; Cribier et al., Journal of General Virology 76(10):2485-2491; Seipp et al., Journal of General Virology 1997 78(10)2467-2478; Iacovacci et al., Research Virology 1997 148(2):147-151; Iocavacci et al., Hepatology 1997 26(5) 1328-1337; Ito et al., Journal of General Virology 1996 77(5):1043-1054; Nakajima et al., Journal of Virology 1996 70(5):3325-3329; Mizutani et al., Journal of Virology 1996 70(10):7219-7223; Valli et al., Res Virol 1995 146(4): 285-288; Kato et al., Biochem Biophys Res Comm 1995 206(3):863-869). Replication of HCV has been demonstrated in both T and B cell lines as well as cell lines derived from human hepatocytes. Demonstration of replication was documented using either RT-PCR based assays or the b-DNA assay. It is important to note that the most recent publications regarding HCV cell cultures document replication for up to 6-months.

[0156] In addition to cell lines that can be infected with HCV, several groups have reported the successful transformation of cell lines with cDNA clones of full-length or partial HCV genomes (Harada et al., Journal of General Virology 1995 76(5)1215-1221; Haramatsu et al., Journal of Viral Hepatitis 1997 4S(l):61-67; Dash et al., American Journal of Pathology 1997 151(2):363-373; Mizuno et al., Gasteroenterology 1995 109(6):1933-40; Yoo et al., Journal Of Virology 1995 69(l):32-38).

### ANIMAL MODELS

[0157] The best characterized animal system for HCV infection is the chimpanzee.

[0158] Moreover, the chronic hepatitis that results from HCV infection in chimpanzees and humans is very similar. Although clinically relevant, the chimpanzee model suffers from several practical impediments that make use of this model difficult. These include; high cost, long incubation requirements and lack of sufficient quantities of animals. Due to these factors, a number of groups have attempted to develop rodent models of chronic hepatitis C infection. While direct infection has not been possible several groups have reported on the stable transfection of either portions or entire HCV genomes into rodents (Yamamoto et al., Hepatology 1995 22(3): 847-855; Galun et al., Journal of Infectious Disease 1995 172(1):25-30; Koike et al, Journal of general Virology 1995 76(12)3031-3038; Pasquinelli et al, Hepatology 1997 25(3): 719-727; Hayashi et al, Princess Takamatsu Symp 1995 25:1430149; Mariya K, Yotsuyanagi H, Shintani Y, Fujie H, Ishibashi K, Matsuura Y, Miyamura T, Koike K. Hepatitis C virus core protein induces hepatic steatosis in transgenic mice. Journal of General Virology 1997 78(7) 1527-1531; Takehara et al, Hepatology 1995 21(3):746-751; Kawamura et al, Hepatology 1997 25(4): 1014-1021). In addition, transplantation of HCV infected human liver into immunocompromised mice results in prolonged detection of HCV RNA in the animal's blood.

[0159] Diagnostic uses

[0160] Ribozymes of this invention may be used as diagnostic tools to examine genetic drift and mutations within diseased cells or to detect the presence of HCV RNA in a cell. The close relationship between ribozyme activity and the structure of the target RNA allows the detection of mutations in any region of the molecule, which alters the base-pairing and three-dimensional structure of the target RNA. By using multiple ribozymes described in this invention, one may map nucleotide changes, which are important to RNA structure and function in vitro, as well as in cells and tissues. Cleavage of target RNAs with ribozymes may be used to inhibit gene expression and define the role (essentially) of specified gene products in the progression of disease. In this manner, other genetic targets may be defmed as important mediators of the disease. These experiments will lead to better treatment of the disease progression by affording the possibility of combination therapies (e.g., multiple ribozymes targeted to different genes, ribozymes coupled with known small molecule inhibitors, or intermittent treatment with combinations of ribozymes and/or other chemical or biological molecules). Other in vitro uses of ribozymes of this invention are well known in the art, and include detection of the presence of mRNAs associated with HCV related condition. Such RNA is detected by determining the presence of a cleavage product after treatment with a ribozyme using standard methodology.

[0161] In a specific example, ribozymes which can cleave only wild-type or mutant forms of the target RNA are used for the assay. The first ribozyme is used to identify wild-type RNA present in the sample and the second ribozyme will be used to identify mutant RNA in the sample. As reaction controls, synthetic substrates of both wild-type and mutant RNA will be cleaved by both ribozymes to demonstrate the relative ribozyme efficiencies in the reactions and the absence of cleavage of the “non-targeted” RNA species. The cleavage products from the synthetic substrates will also serve to generate size markers for the analysis of wild-type and mutant RNAs in the sample population. Thus each analysis will require two ribozymes, two substrates and one unknown sample which will be combined into six reactions. The presence of cleavage products will be determined using an RNase protection assay so that full-length and cleavage fragments of each RNA can be analyzed in one lane of a polyacrylamide gel. It is not absolutely required to quantify the results to gain insight into the expression of mutant RNAs and putative risk of the desired phenotypic changes in target cells. The expression of MRNA whose protein product is implicated in the development of the phenotype (i.e., HCV) is adequate to establish risk. If probes of comparable specific activity are used for both transcripts, then a qualitative comparison of RNA levels will be adequate and will decrease the cost of the initial diagnosis. Higher mutant form to wild-type ratios will be correlated with higher risk whether RNA levels are compared qualitatively or quantitatively.

[0162] Additional Uses

[0163] Potential usefulness of sequence-specific enzymatic nucleic acid molecules of the instant invention might have many of the same applications for the study of RNA that DNA restriction endonucleases have for the study of DNA (Nathans et al., 1975 Ann. Rev. Biochem. 44:273). For example, the pattern of restriction fragments could be used to establish sequence relationships between two related RNAs, and large RNAs could be specifically cleaved to fragments of a size more useful for study. The ability to engineer sequence specificity of the ribozyme is ideal for cleavage of RNAs of unknown sequence.

[0164] Other embodiments are within the following claims.

TABLE I
Characteristics of naturally occurring ribozymes

Group I Introns
Size: ˜150 to >1000 nucleotides.
Requires a U in the target sequence immediately 5′ of the cleavage site.
Binds 4-6 nucleotides at the 5′-side of the cleavage site.
Reaction mechanism: attack by the 3′-OH of guanosine to generate cleavage products with
3′-OH and 5′-guanosine.
Additional protein cofactors required in some cases to help folding and maintainance of
the active structure.
Over 300 known members of this class. Found as an intervening sequence in Tetrahymena
thermophila rRNA, fungal mitochondria, chloroplasts, phage T4, blue-green algae, and
others.
Major structural features largely established through phylogenetic comparisons,
mutagenesis, and biochemical studies [ⁱ,ⁱⁱ].
Complete kinetic framework established for one ribozyme [ⁱⁱⁱ,^{iv},^{v},^{vi}].
Studies of ribozyme folding and substrate docking underway [^{vii},^{viii},^{ix}].
Chemical modification investigation of important residues well established [^{x},^{xi}].
The small (4-6 nt) binding site may make this ribozyme too non-specific for targeted RNA
cleavage, however, the Tetrahymena group I intron has been used to repair a “defective”
β-galactosidase message by the ligation of new β-galactosidase sequences onto the
defective message [^{xii}].
RNAse P RNA (M1 RNA)
Size: ˜290 to 400 nucleotides.
RNA portion of a ubiquitous ribonucleoprotein enzyme.
Cleaves tRNA precursors to form mature tRNA [^{xiii}].
Reaction mechanism: possible attack by M²⁺-OH to generate cleavage products with 3′-
OH and 5′-phosphate.
RNAse P is found throughout the prokaryotes and eukaryotes. The RNA subunit has
been sequenced from bacteria, yeast, rodents, and primates.
Recruitment of endogenous RNAse P for therapeutic applications is possible through
hybridization of an External Guide Sequence (EGS) to the target RNA [^{xiv},^{xv}]
Important phosphate and 2′ OH contacts recently identified [^{xvi},^{xvii}]
Group II Introns
Size: >1000 nucleotides.
Trans cleavage of target RNAs recently demonstrated [^{xviii},^{xix}].
Sequence requirements not fully determined.
Reaction mechanism: 2′-OH of an internal adenosine generates cleavage products with 3′-
OH and a “lariat” RNA containing a 3′-5′ and a 2′-5′ branch point.
Only natural ribozyme with demonstrated participation in DNA cleavage [^{xx},^{xxi}] in
addition to RNA cleavage and ligation.
Major structural features largely established through phylogenetic comparisons [^{xxii}].
Important 2′ OH contacts beginning to be identified [^{xxiii}]
Kinetic framework under development [^{xxiv}]
Neurospora VS RNA
Size: ˜144 nucleotides.
Trans cleavage of hairpin target RNAs recently demonstrated [^{xxv}].
Sequence requirements not fully determined.
Reaction mechanism: attack by 2′-OH 5′ to the scissile bond to generate cleavage products
with 2′,3′-cyclic phosphate and 5′-OH ends.
Binding sites and structural requirements not fully determined.
Only 1 known member of this class. Found in Neurospora VS RNA.
Hammerhead Ribozyme
(see text for references)
Size: ˜13 to 40 nucleotides.
Requires the target sequence UH immediately 5′ of the cleavage site.
Binds a variable number nucleotides on both sides of the cleavage site.
Reaction mechanism: attack by 2′-OH 5′ to the scissile bond to generate cleavage products
with 2′,3′-cyclic phosphate and 5′-OH ends.
14 known members of this class. Found in a number of plant pathogens (virusoids) that
use RNA as the infectious agent.
Essential structural features largely defined, including 2 crystal structures [^{xxvi},^{xxvii}]
Minimal ligation activity demonstrated (for engineering through in vitro selection) [^{xxviii}]
Complete kinetic framework established for two or more ribozymes [^{xxix}].
Chemical modification investigation of important residues well established [^{xxx}].
Hairpin Ribozyme
Size: ˜50 nucleotides.
Requires the target sequence GUC immediately 3′ of the cleavage site.
Binds 4-6 nucleotides at the 5′-side of the cleavage site and a variable number to the 3′-
side of the cleavage site.
Reaction mechanism: attack by 2′-OH 5′ to the scissile bond to generate cleavage products
with 2′,3′-cyclic phosphate and 5′-OH ends.
3 known members of this class. Found in three plant pathogen (satellite RNAs of the
tobacco ringspot virus, arabis mosaic virus and chicory yellow mottle virus) which uses
RNA as the infectious agent.
Essential structural features largely defined [^{xxxi},^{xxxii},^{xxxiii},^{xxiv}]
Ligation activity (in addition to cleavage activity) makes ribozyme amenable to
engineering through in vitro selection [^{xxxv}]
Complete kinetic framework established for one ribozyme [^{xxxvi}].
Chemical modification investigation of important residues begun [^{xxxvii},^{xxxviii}].
Hepatitis Delta Virus (HDV) Ribozyme
Size: ˜60 nucleotides.
Trans cleavage of target RNAs demonstrated [^{xxxix}].
Binding sites and structural requirements not fully determined, although no sequences 5′of
cleavage site are required. Folded ribozyme contains a pseudoknot structure [^{xl}].
Reaction mechanism: attack by 2′-OH 5′ to the scissile bond to generate cleavage products
with 2′,3′-cyclic phosphate and 5′-OH ends.
Only 2 known members of this class. Found in human HDV.
Circular form of HDV is active and shows increased nuclease stability [^{xli}]
[ⁱ ]Michel, Francois; Westhof, Eric. Slippery substrates. Nat. Struct. Biol. (1994), 1(1), 5-7.
[ⁱⁱ ]Lisacek, Frederique; Diaz, Yolande; Michel, Francois. Automatic identification of group I intron cores in genomic DNA sequences. J. Mol. Biol. (1994), 235(4), 1206-17.
[ⁱⁱⁱ ]Herschlag, Daniel; Cech, Thomas R.. Catalysis of RNA cleavage by the Tetrahymena thermophila ribozyme. 1. Kinetic description of the reaction of an RNA substrate complementary to the active site. Biochemistry (1990), 29(44), 10159-71.
[^{iv} ]Herschlag, Daniel; Cech, Thomas R.. Catalysis of RNA cleavage by the Tetrahymena thermophila ribozyme. 2. Kinetic description of the reaction of an RNA substrate that forms a mismatch at the active site. Biochemistry (1990), 29(44), 10172-80.
[^{v} ]Knitt, Deborah S.; Herschlag, Daniel. pH Dependencies of the Tetrahymena Ribozyme Reveal an Unconventional Origin of an Apparent pKa. Biochemistry (1996), 35(5), 1560-70.
[^{vi} ]Bevilacqua, Philip C.; Sugimoto, Naoki; Turner, Douglas H.. A mechanistic framework for the second step of splicing catalyzed by the Tetrahymena ribozyme. Biochemistry (1996), 35(2), 648-58.
[^{vii} ]Li, Yi; Bevilacqua, Philip C.; Mathews, David; Turner, Douglas H.. Thermodynamic and activation parameters for binding of a pyrene-labeled substrate by the Tetrahymena ribozyme: docking is not diffusion-controlled and is driven by a favorable entropy change. Biochemistry (1995), 34(44), 14394-9.
[^{viii} ]Banerjee, Aloke Raj; Turner, Douglas H.. The time dependence of chemical modification reveals slow steps in the folding of a group I ribozyme. Biochemistry (1995), 34(19), 6504-12.
[^{ix} ]Zarrinkar, Patrick P.; Williamson, James R.. The P9.1-P9.2 peripheral extension helps guide folding of the Tetrahymena ribozyme. Nucleic Acids Res. (1996), 24(5), 854-8.
[^{x} ]Strobel, Scott A.; Cech, Thomas R.. Minor groove recognition of the conserved G.cntdot.U pair at the Tetrahymena ribozyme reaction site. Science (Washington, D.C.) (1995), 267(5198), 675-9.
[^{xi} ]Strobel, Scott A.; Cech, Thomas R.. Exocyclic Amine of the Conserved G.cntdot.U Pair at the Cleavage Site of the Tetrahymena Ribozyme Contributes to 5′-Splice Site Selection and Transition State Stabilization. Biochemistry (1996), 35(4), 1201-11.
[^{xii} ]Sullenger, Bruce A.; Cech, Thomas R.. Ribozyme-mediated repair of defective mRNA by targeted trans-splicing. Nature (London) (1994), 371(6498), 619-22.
[^{xiii} ]Robertson, H. D.; Altman, S.; Smith, J. D. J. Biol. Chem., 247, 5243-5251 (1972).
[^{xiv} ]Forster, Anthony C.; Altman, Sidney. External guide sequences for an RNA enzyme. Science (Washington, D.C., 1883-) (1990), 249(4970), 783-6.
[^{xv} ]Yuan, Y.; Hwang, E. S.; Altman, S. Targeted cleavage of mRNA by human RNase P. Proc. Natl. Acad. Sci. USA (1992) 89, 8006-10.
[^{xvi} ]Harris, Michael E.; Pace, Norman R.. Identification of phosphates involved in catalysis by the ribozyme RNase P RNA. RNA (1995), 1(2), 210-18.
[^{xvii} ]Pan, Tao; Loria, Andrew; Zhong, Kun. Probing of tertiary interactions in RNA: 2′-hydroxyl-base contacts between the RNase P RNA and pre-tRNA. Proc. Natl. Acad. Sci. U.S.A. (1995), 92(26), 12510-14.
[^{xviii} ]Pyle, Anna Marie; Green, Justin B.. Building a Kinetic Framework for Group II Intron Ribozyme Activity: Quantitation of Interdomain Binding and Reaction Rate. Biochemistry (1994), 33(9), 2716-25.
[^{xix} ]Michels, William J. Jr.; Pyle, Anna Marie. Conversion of a Group II Intron into a New Multiple-Turnover Ribozyme that Selectively Cleaves Oligonucleotides: Elucidation of Reaction Mechanism and Structure/Function Relationships. Biochemistry (1995), 34(9), 2965-77.
[^{xx} ]Zimmerly, Steven; Guo, Huatao; Eskes, Robert; Yang, Jian; Perlman, Philip S.; Lambowitz, Alan M.. A group II intron RNA is a catalytic component of a DNA endonuclease involved in intron mobility. Cell (Cambridge, Mass.) (1995), 83(4), 529-38.
[^{xxi} ]Griffin, Edmund A., Jr.; Qin, Zhifeng; Michels, Williams J., Jr.; Pyle, Anna Marie. Group II intron ribozymes that cleave DNA and RNA linkages with similar efficiency, and lack contacts with substrate 2′-hydroxyl groups. Chem. Biol. (1995), 2(11), 761-70.
[^{xxii} ]Michel, Francois; Ferat, Jean Luc. Structure and activities of group II introns. Annu. Rev. Biochem. (1995), 64, 435-61.
[^{xxiii} ]Abramovitz, Dana L.; Friedman, Richard A.; Pyle, Anna Marie. Catalytic role of 2′-hydroxyl groups within a group II intron active site. Science (Washington, D.C.) (1996), 271(5254), 1410-13.
[^{xxiv} ]Daniels, Danette L.; Michels, William J., Jr.; Pyle, Anna Marie. Two competing pathways for self-splicing by group II introns: a quantitative analysis of in vitro reaction rates and products. J. Mol. Biol. (1996), 256(1), 31-49.
[^{xxv} ]Guo, Hans C. T.; Collins, Richard A.. Efficient trans-cleavage of a stem-loop RNA substrate by a ribozyme derived from Neurospora VS RNA. EMBO J. (1995), 14(2), 368-76.
[^{xxvi} ]Scott, W. G., Finch, J. T., Aaron, K. The crystal structure of an all RNA hammerhead ribozyme:Aproposed mechanism for RNA catalytic cleavage. Cell, (1995), 81, 991-1002.
[^{xvii} ]McKay, Structure and function of the hammerhead ribozyme: an unfinished story. RNA, (1996), 2, 395-403.
[^{xviii} ]Long, D., Uhlenbeck, 0., Hertel, K. Ligation with hammerhead ribozymes. U.S. Pat. No. 5,633,133.
[^{xvix} ]Hertel, K. J., Herschlag, D., Uhlenbeck, O. A kinetic and thermodynamic framework for the hammerhead ribozyme reaction. Biochemistry, (1994) 33, 3374-3385.Beigelman, L., et al., Chemical modifications of hammerhead ribozymes. J. Biol. Chem., (1995) 270, 25702-25708.
[^{xxx} ]Beigelman, L., et al., Chemical modifications of hammerhead ribozymes. J. Biol. Chem., (1995) 270, 25702-25708.
[^{xxxi} ]Hampel, Arnold; Tritz, Richard; Hicks, Margaret; Cruz, Phillip. ‘Hairpin’ catalytic RNA model: evidence for helixes and sequence requirement for substrate RNA. Nucleic Acids Res. (1990), 18(2), 299-304.
[^{xxxii} ]Chowrira, Bharat M.; Berzal-Herranz, Alfredo; Burke, John M.. Novel guanosine requirement for catalysis by the hairpin ribozyme. Nature (London) (1991), 354(6351), 320-2.
[^{xxxiii} ]Berzal-Herranz, Alfredo; Joseph, Simpson; Chowrira, Bharat M.; Butcher, Samuel E.; Burke, John M.. Essential nucleotide sequences and secondary structure elements of the hairpin ribozyme. EMBO J. (1993), 12(6), 2567-73.
[^{xxxiv} ]Joseph, Simpson; Berzal-Herranz, Alfredo; Chowrira, Bharat M.; Butcher, Samuel E.. Substrate selection rules for the hairpin ribozyme determined by in vitro selection, mutation, and analysis of mismatched substrates. Genes Dev. (1993), 7(1), 130-8.
[^{xxxv} ]Berzal-Herranz, Alfredo; Joseph, Simpson; Burke, John M.. In vitro selection of active hairpin ribozymes by sequential RNA-catalyzed cleavage and ligation reactions. Genes Dev. (1992), 6(1), 129-34.
[^{xxxvi} ]Hegg, Lisa A.; Fedor, Martha J.. Kinetics and Thermodynamics of Intermolecular Catalysis by Hairpin Ribozymes. Biochemistry (1995), 34(48), 15813-28.
[^{xxxvii} ]Grasby, Jane A.; Mersmann, Karin; Singh, Mohinder; Gait, Michael J.. Purine Functional Groups in Essential Residues of the Hairpin Ribozyme Required for Catalytic Cleavage of RNA. Biochemistry (1995), 34(12), 4068-76.
[^{xxxviii} ]Schmidt, Sabine; Beigelman, Leonid; Karpeisky, Alexander; Usman, Nassim; Sorensen, Ulrik S.; Gait, Michael J.. Base and sugar requirements for RNA cleavage of essential nucleoside residues in internal loop B of the hairpin ribozyme: implications for secondary structure. Nucleic Acids Res. (1996), 24(4), 573-81.
[^{xxix} ]Perrotta, Anne T.; Been, Michael D.. Cleavage of oligoribonucleotides by a ribozyme derived from the hepatitis .delta. virus RNA sequence. Biochemistry (1992), 31(1), 16-21.
[^{xl} ]Perrotta, Anne T.; Been, Michael D.. A pseudoknot-like structure required for efficient self-cleavage of hepatitis delta virus RNA. Nature (London) (1991), 350(6317), 434-6.
[^{xli} ]Puttaraju, M.; Perrotta, Anne T.; Been, Michael D.. A circular trans-acting hepatitis delta virus ribozyme. Nucleic Acids Res. (1993), 21(18), 4253-8.

[0165] TABLE II
2.5 μmol RNA Synthesis Cycle

| | | | Wait |
|---|---|---|---|
| Reagent | Equivalents | Amount | Time* |
| Phosphoramidites | 6.5 | 163 μL | 2.5 |
| S-Ethyl Tetrazole | 23.8 | 238 μL | 2.5 |
| Acetic Anhydride | 100 | 233 μL | 5 sec |
| N-Methyl Imidazole | 186 | 233 μL | 5 sec |
| TCA | 83.2 | 1.73 mL | 21 sec |
| Iodine | 8.0 | 1.18 mL | 45 sec |
| Acetonitrile | NA | 6.67 mL | NA |

*Wait time does not include contact time during delivery.

[0166] TABLE III
Ribozyme Selection Characteristics

| Characteristic | Number | |
|---|---|---|
| HCV Genome Length | 9436 | kb |
| All Hammerhead Cleavage Sites* | 1300 | |
| Conserved Region Hammerhead Cleavage | 23 | |
| Sites** | | |

*HCV Genotype 1b was the prototype strain
**Based on sequence alignments from HCV genotype 1a, 1b, 1c, 2a, 2b, 2c 3a, 3b, 4a, 4c, 4f, 5a, and 6a

[0167] TABLE IV
Hammerhead Ribozymes Derived from Conserved Regions of
the HCV Genome

| | | |
|---|---|---|
| Name | Substrate | Ribozyme Sequence |

| | | |
|---|---|---|
| 5′ NCR | | |
| HCV.5-50 | CUACUGU C UUCACGC | GCGUGAA CUGAUGAGGCCGUUAGGCCGAA ACAGUAG |
| HCV.5-67 | AAAGCGU C UAGCCAU | AUGGCUA CUGAUGAGGCCGUUAGGCCGAA ACGCUUU |
| HCV.5-69 | AGCGUCU A GCCAUGG | CCAUGGC CUGAUGAGGCCGUUAGGCCGAA AGACGCU |
| HCV.5-92 | UGAGUGU C GUGCAGC | GCUGCAC CUGAUGAGGCCGUUAGGCCGAA ACACUCA |
| HCV.5-130 | GAGCCAU A GUGGUCU | AGACCAC CUGAUGAGGCCGUUAGGCCGAA AUGGCUC |
| HCV.5-136 | UAGUGGU C UGCGGAA | UUCCGCA CUGAUGAGGCCGUUAGGCCGAA ACCACUA |
| HCV.5-153 | GGUGAGU A CACCGGA | UCCGGUG CUGAUGAGGCCGUUAGGCCGAA ACUCACC |
| HCV 5-180 | ACCGGGU C CUUUCUU | AAGAAAG CUGAUGAGGCCGUUAGGCCGAA ACCCGGU |
| HCV.5-183 | GGGUCCU U UCUUGGA | UCCAAGA CUGAUGAGGCCGUUAGGCCGAA AGGACCC |
| HCV.5-184 | GGUCCUU U CUUGGAU | AUCCAAG CUGAUGAGGCCGUUAGGCCGAA AAGGACC |
| HCV.5-258 | GUUGGGU C GCGAAAG | CUUUCGC CUGAUGAGGCCGUUAGGCCGAA ACCCAAC |
| HCV 5-270 | AAGGGCU U GUGGUAC | GUACCAC CUGAUGAGGCCGUUAGGCCGAA AGGCCUU |
| HCV.5-294 | GGGUGCU U GCGAGUG | CACUCGC CUGAUGAGGCCGUUAGGCCGAA AGCACCC |
| HCV.5-313 | GGGAGGU C UCGUAGA | UCUACGA CUGAUGAGGCCGUUAGGCCGAA ACCUCCC |
| HCV.5-315 | GAGGUCU C GUAGACC | GGUCUAC CUGAUGAGGCCGUUAGGCCGAA AGACCUC |
| HCV.5-318 | GUCUCGU A GACCGUG | CACGGUC CUGAUGAGGCCGUUAGGCCGAA ACGAGAC |
| Core Region | | |
| HCV.C-30 | UAAACCU C AAAGAAA | UUUCUUU CUGAUGAGGCCGUUAGGCCGAA AGGUUUA |
| HCV.C-48 | CAAACGU A ACACCAA | UUGGUGU CUGAUGAGGCCGUUAGGCCGAA ACGUUUG |
| HCV C-60 | CAACCGU C GCCCACA | UGUGGGC CUGAUGAGGCCGUUAGGCCGAA ACGGUUG |
| HCV.C-175 | GAGCGGU C ACAACCU | AGGUUGU CUGAUGAGGCCGUUAGGCCGAA ACCGCUC |
| HCV C-374 | GUAAGGU C AUCGAUA | UAUCGAU CUGAUGAGGCCGUUAGGCCGAA ACCUUAC |
| 3′ NCR | | |
| HCV.3-118 | UUUUUUU U UUUUUUU | AAAAAAA CUGAUGAGGCCGUUAGGCCGAA AAAAAAA |
| HCV.3-145 | GGUGGCU C CAUCUUA | UAAGAUG CUGAUGAGGCCGUUAGGCCGAA AGCCACC |
| HCV.3-149 | GCUCCAU C UUAGCCC | GGGCUAA CUGAUGAGGCCGUUAGGCCGAA AUGGAGC |
| HCV.3-151 | UCCAUCU U AGCCCUA | UAGGGCU CUGAUGAGGCCGUUAGGCCGAA AGAUGGA |
| HCV.3-152 | CCAUCUU A GCCCUAG | CUAGGGC CUGAUGAGGCCGUUAGGCCGAA AAGAUGG |
| HCV.3-158 | UAGCCCU A GUCACGG | CCGUGAG CUGAUGAGGCCGUUAGGCCGAA AGGGCUA |
| HCV 3-161 | CCCUAGU C ACGGCUA | UAGCCGU CUGAUGAGGCCGUUAGGCCGAA ACUAGGG |
| HCV.3-168 | CACGGCU A GCUGUGA | UCACAGC CUGAUGAGGCCGUUAGGCCGAA AGCCGUG |
| HCV.3-181 | GAAAGGU C CGUGAGC | GCUCACG CUGAUGAGGCCGUUAGGCCGAA ACCUUUC |

[0168] TABLE V
HCV Hammerhead Ribozyme and Target Sequence

| | | | | |
|---|---|---|---|---|
| | | Nt. | | |
| No. | Name | Pos. | Hammerhead Ribozyme | Substrate |

| | | | | |
|---|---|---|---|---|
| 1 | HCV-27 | 27 | UAUGGUG CUGAUGAG X CGAA AGUGUCG | CGACACU C CACCAUA |
| 2 | HCV-114 | 114 | GGUCCUG CUGAUGAG X CGAA AGGCUGC | GCAGCCU C CAGGACC |
| 3 | HCV-128 | 128 | CUCCCGG CUGAUGAG X CGAA AGGGGGG | CCCCCCU C CCGGGAG |
| 4 | HCV-148 | 148 | UUCCGCA CUGAUGAG X CGAA ACCACUA | UAGUGGU C UGCGGAA |
| 5 | HCV-165 | 165 | UCCGGUG CUGAUGAG X CGAA ACUCACC | GGUGAGU A CACCGGA |
| 6 | HCV-175 | 175 | UCCUGGC CUGAUGAG X CGAA AUUCCGG | CCGGAAU U GCCAGGA |
| 7 | HCV-199 | 199 | UUGAUCC CUGAUGAG X CGAA AGAAAGG | CCUUUCU U GGAUCAA |
| 8 | HCV-213 | 213 | AGGCAUU CUGAUGAG X CGAA AGCGGGU | ACCCGCU C AAUGCCU |
| 9 | HCV-252 | 252 | ACUCGGC CUGAUGAG X CGAA AGCAGUC | GACUGCU A GCCGAGU |
| 10 | HCV-260 | 260 | CCAACAC CUGAUGAG X CGAA ACUCGGC | GCCGAGU A GUGUUGG |
| 11 | HCV-265 | 265 | GCGACCC CUGAUGAG X CGAA ACACUAC | GUAGUGU U GGGUCGC |
| 12 | HCV-270 | 270 | CUUUCGC CUGAUGAG X CGAA ACCCAAC | GUUGGGU C GCGAAAG |
| 13 | HCV-288 | 288 | CAGGCAG CUGAUGAG X CGAA ACCACAA | UUGUGGU A CUGCCUG |
| 14 | HCV-298 | 298 | AGCACCC CUGAUGAG X CGAA AUCAGGC | GCCUGAU A GGGUGCU |
| 15 | HCV-306 | 306 | CACUCGC CUGAUGAG X CGAA AGCACCC | GGGUGCU U GCGAGUG |
| 16 | HCV-325 | 325 | UCUACGA CUGAUGAG X CGAA ACCUCCC | GGGAGGU C UCGUAGA |
| 17 | HCV-327 | 327 | GGUCUAC CUGAUGAG X CGAA AGACCUC | GAGGUCU C GUAGACC |
| 18 | HCV-330 | 330 | CACGGUC CUGAUGAG X CGAA ACGAGAC | GUCUCGU A GACCGUG |
| 19 | HCV-407 | 407 | GGAACUU CUGAUGAG X CGAA ACGUCCU | AGGACGU C AAGUUCC |
| 20 | HCV-412 | 412 | GCCCGGG CUGAUGAG X CGAA ACUUGAC | GUCAAGU U CCCGGGC |
| 21 | HCV-413 | 413 | CGCCCGG CUGAUGAG X CGAA AACUUGA | UCAAGUU C CCGGGCG |
| 22 | HCV-426 | 426 | ACGAUCU CUGAUGAG X CGAA ACCACCG | CGGUGGU C AGAUCGU |
| 23 | HCV-472 | 472 | CACACCC CUGAUGAG X CGAA ACGUGGG | CCCACGU U GGGUGUG |
| 24 | HCV-489 | 489 | GUCUUCC CUGAUGAG X CGAA AGUCGCG | CGCGACU A GGAAGAC |
| 25 | HCV-498 | 498 | CGUUCGG CUGAUGAG X CGAA AGUCUUC | GAAGACU U CCGAACG |
| 26 | HCV-499 | 499 | CCGUUCG CUGAUGAG X CGAA AAGUCUU | AAGACUU C CGAACGG |
| 27 | HCV-508 | 508 | AGGUUGC CUGAUGAG X CGAA ACCGUUC | GAACGGU C GCAACCU |
| 28 | HCV-534 | 534 | UUGGGGA CUGAUGAG X CGAA AGGUUGU | ACAACCU A UCCCCAA |
| 29 | HCV-536 | 536 | CCUUGGG CUGAUGAG X CGAA AUAGGUU | AACCUAU C CCCAAGG |
| 30 | HCV-546 | 546 | GGUCGGC CUGAUGAG X CGAA AGCCUUG | CAAGGCU C GCCGACC |
| 31 | HCV-561 | 561 | CAGGCCC CUGAUGAG X CGAA ACCCUCG | CGAGGGU A GGGCCUG |
| 32 | HCV-573 | 573 | CCAGGCU CUGAUGAG X CGAA AGCCCAG | CUGGGCU C AGCCUGG |
| 33 | HCV-583 | 583 | CCAAGGG CUGAUGAG X CGAA ACCCAGG | CCUGGGU A CCCUUGG |
| 34 | HCV-588 | 588 | AGGGGCC CUGAUGAG X CGAA AGGGUAC | GUACCCU U GGCCCCU |
| 35 | HCV-596 | 596 | UGCCAUA CUGAUGAG X CGAA AGGGGCC | GGCCCCU C UAUGGCA |
| 36 | HCV-598 | 598 | AUUGCCA CUGAUGAG X CGAA AGAGGGG | CCCCUCU A UGGCAAU |
| 37 | HCV-632 | 632 | GUGACAG CUGAUGAG X CGAA AGCCAUC | GAUGGCU C CUGUCAC |
| 38 | HCV-637 | 637 | GCGGGGU CUGAUGAG X CGAA ACAGGAG | CUCCUGU C ACCCCGC |
| 39 | HCV-649 | 649 | AGGCCGG CUGAUGAG X CGAA AGCCGCG | CGCGGCU C CCGGCCU |
| 40 | HCV-657 | 657 | CCCCAAC CUGAUGAG X CGAA AGGCCGG | CCGGCCU A GUUGGGG |
| 41 | HCV-660 | 660 | GGGCCCC CUGAUGAG X CGAA ACUAGGC | GCCUAGU U GGGGCCC |
| 42 | HCV-696 | 696 | UUACCCA CUGAUGAG X CGAA AUUGCGC | GCGCAAU C UGGGUAA |
| 43 | HCv-707 | 707 | UAUCGAU CUGAUGAG X CGAA ACCUUAC | GUAAGGU C AUCGAUA |
| 44 | HCV-710 | 710 | GGGUAUC CUGAUGAG X CGAA AUGACCU | AGGUCAU C GAUACCC |
| 45 | HCV-714 | 714 | GUGAGGG CUGAUGAG X CGAA AUCGAUG | CAUCGAU A CCCUCAC |
| 46 | HCV-730 | 730 | GUCGGCG CUGAUGAG X CGAA AGCCGCA | UGCGGCU U CGCCGAC |
| 47 | HCV-731 | 731 | GGUCGGC CUGAUGAG X CGAA AAGCCGC | GCGGCUU C GCCGACC |
| 48 | HCV-748 | 748 | CGGAAUG CUGAUGAG X CGAA ACCCCAU | AUGGGGU A CAUUCCG |
| 49 | HCV-752 | 752 | CGAGCGG CUGAUGAG X CGAA AUGUACC | GGUACAU U CCGCUCG |
| 50 | HCV-753 | 753 | ACGAGCG CUGAUGAG X CGAA AAUGUAC | GUACAUU C CGCUCGU |
| 51 | HCV-758 | 758 | CGCCGAC CUGAUGAG X CGAA AGCGGAA | UUCCGCU C GUCGGCG |
| 52 | HCV-761 | 761 | GGGCGCC CUGAUGAG X CGAA ACGAGCG | CGCUCGU C GGCGCCC |
| 53 | HCV-773 | 773 | CGCCCCC CUGAUGAG X CGAA AGGGGGG | CCCCCCU A GGGGGCG |
| 54 | HCV-806 | 806 | GAACCCG CUGAUGAG X CGAA ACACCAU | AUGGUGU C CGGGUUC |
| 55 | HCV-812 | 812 | CCUCCAG CUGAUGAG X CGAA ACCCGGA | UCCGGGU U CUGGAGG |
| 56 | HCV-813 | 813 | UCCUCCA CUGAUGAG X CGAA AACCCGG | CCGGGUU C UGGAGGA |
| 57 | HCV-832 | 832 | UGUUGCG CUGAUGAG X CGAA AGUUCAC | GUGAACU A CGCAACA |
| 58 | HCV-847 | 847 | ACCGGGC CUGAUGAG X CGAA AGUUCCC | GGGAACU U GCCCGGU |
| 59 | HCV-855 | 855 | AAAGAGC CUGAUGAG X CGAA ACCGGGC | GCCCGGU U GCUCUUU |
| 60 | HCV-859 | 859 | AGAGAAA CUGAUGAG X CGAA AGCAACC | GGUUGCU C UUUCUCU |
| 61 | HCV-982 | 982 | UGCCUCA CUGAUGAG X CGAA ACACAAU | AUUGUGU A UGAGGCA |
| 62 | HCV-1001 | 1001 | UAUGCAU CUGAUGAG X CGAA AUCAUGC | GCAUGAU C AUGCAUA |
| 63 | HCV-1022 | 1022 | CGCAGGG CUGAUGAG X CGAA ACGCACC | GGUGCGU A CCCUGCG |
| 64 | HCV-1031 | 1031 | UCUCCCG CUGAUGAG X CGAA ACGCAGG | CCUGCGU U CGGGAGA |
| 65 | HCV-1032 | 1032 | UUCUCCC CUGAUGAG X CGAA AACGCAG | CUGCGUU C GGGAGAA |
| 66 | HCV-1048 | 1048 | ACAACGG CUGAUGAG X CGAA AGGCGUU | AACGCCU C CCGUUGU |
| 67 | HCV-1053 | 1053 | ACCCAAC CUGAUGAG X CGAA ACGGGAG | CUCCCGU U GUUGGGU |
| 68 | HCV-1056 | 1056 | GCUACCC CUGAUGAG X CGAA ACAACGG | CCGUUGU U GGGUAGC |
| 69 | HCV-1061 | 1061 | UGAGCGC CUGAUGAG X CGAA ACCCAAC | GUUGGGU A GCGCUCA |
| 70 | HCV-1127 | 1127 | GCAAGUC CUGAUGAG X CGAA ACGUGGC | GCCACGU C GACUUGC |
| 71 | HCV-1132 | 1132 | AACGAGC CUGAUGAG X CGAA AGUCGAC | GUCGACU U GCUCGUU |
| 72 | HCV-1136 | 1136 | CCCCAAC CUGAUGAG X CGAA AGCAAGU | ACUUGCU C GUUGGGG |
| 73 | HCV-1139 | 1139 | CCGCCCC CUGAUGAG X CGAA ACGAGCA | UGCUCGU U GGGGCGG |
| 74 | HCV-1153 | 1153 | GGAACAG CUGAUGAG X CGAA AAGCGGC | GCCGCUU U CUGUUCC |
| 75 | HCV-1154 | 1154 | CGGAACA CUGAUGAG X CGAA AAAGCGG | CCGCUUU C UGUUCCG |
| 76 | HCV-1158 | 1158 | AUGGCGG CUGAUGAG X CGAA ACAGAAA | UUUCUGU U CCGCCAU |
| 77 | HCV-1159 | 1159 | CAUGGCG CUGAUGAG X CGAA AACAGAA | UUCUGUU C CGCCAUG |
| 78 | HCV-1168 | 1168 | CCCCACG CUGAUGAG X CGAA ACAUGGC | GCCAUGU A CGUGGGG |
| 79 | HCV-1189 | 1189 | GAAAACG CUGAUGAG X CGAA AUCCGCA | UGCGGAU C CGUUUUC |
| 80 | HCV-1193 | 1193 | CGAGGAA CUGAUGAG X CGAA ACGGAUC | GAUCCGU U UUCCUCG |
| 81 | HCV-1194 | 1194 | ACGAGGA CUGAUGAG X CGAA AACGGAU | AUCCGUU U UCCUCGU |
| 82 | HCV-1195 | 1195 | GACGAGG CUGAUGAG X CGAA AAACGGA | UCCGUUU U CCUCGUC |
| 83 | HCV-1196 | 1196 | AGACGAG CUGAUGAG X CGAA AAAACGG | CCGUUUU C CUCGUCU |
| 84 | HCV-1200 | 1280 | GACCUGA CUGAUGAG X CGAA ACAUGGG | GCCAUGU A UCAGGUC |
| 85 | HCV-1282 | 1282 | GUGACCU CUGAUGAG X CGAA AUACAUG | CAUGUAU C AGGUCAC |
| 86 | HCV-1287 | 1207 | AUGCGGU CUGAUGAG X CGAA ACCUGAU | AUCAGGU C ACCGCAU |
| 87 | HCV-1373 | 1373 | UAUCCAC CUGAUGAG X CGAA ACAGCUU | AAGCUGU C GUGGAUA |
| 88 | HCV-1380 | 1380 | GCCACCA CUGAUGAG X CGAA AUCCACG | CGUGGAU A UGGUGGC |
| 89 | HCV-1406 | 1406 | CCGCUAG CUGAUGAG X CGAA ACUCCCC | GGGGAGU C CUAGCGG |
| 90 | HCV-1409 | 1409 | GGCCCGC CUGAUGAG X CGAA AGGACUC | GAGUCCU A GCGGGCC |
| 91 | HCV-1418 | 1418 | AGUAGGC CUGAUGAG X CGAA AGGCCCG | CGGGCCU U GCCUACU |
| 92 | HCV-1423 | 1423 | GGAAUAG CUGAUGAG X CGAA AGGCAAG | CUUGCCU A CUAUUCC |
| 93 | HCV-1426 | 1426 | CAUGGAA CUGAUGAG X CGAA AGUAGGC | GCCUACU A UUCCAUG |
| 94 | HCV-1428 | 1428 | ACCAUGG CUGAUGAG X CGAA AUAGUAG | CUACUAU U CCAUGGU |
| 95 | HCV-1429 | 1429 | CACCAUG CUGAUGAG X CGAA AAUAGUA | UACUAUU C CAUGGUG |
| 96 | HCV-1727 | 1727 | ACUUGUC CUGAUGAG X CGAA AUGGAGC | GCUCCAU C GACAAGU |
| 97 | HCV-1735 | 1735 | CUGAGCG CUGAUGAG X CGAA ACUUGUC | GACAAGU U CGCUCAG |
| 98 | HCV-1736 | 1736 | CCUGAGC CUGAUGAG X CGAA AACUUGU | ACAAGUU C GCUCAGG |
| 99 | HCV-1740 | 1740 | CAUCCCU CUGAUGAG X CGAA AGCGAAC | GUUCGCU C AGGGAUG |
| 100 | HCV-1757 | 1757 | UAUAGGU CUGAUGAG X CGAA AUGGGGC | GCCCCAU C ACCUAUA |
| 101 | HCV-1762 | 1762 | CUCGGUA CUGAUGAG X CGAA AGGUGAU | AUCACCU A UACCGAG |
| 102 | HCV-1795 | 1795 | CCAGCAG CUGAUGAG X CGAA AAGGCCU | AGGCCUU A CUGCUGG |
| 103 | HCV-1806 | 1806 | GGUGCGU CUGAUGAG X CGAA AUGCCAG | CUGGCAU U ACGCACC |
| 104 | HCV-1807 | 1807 | AGGUGCG CUGAUGAG X CGAA AAUGCCA | UGGCAUU A CGCACCU |
| 105 | HCV-1815 | 1815 | CACUGCC CUGAUGAG X CGAA AGGUGCG | CGCACCU C GGCAGUG |
| 106 | HCV-1827 | 1827 | GGUACGA CUGAUGAG X CGAA ACCACAC | GUGUGGU A UCGUACC |
| 107 | HCV-1829 | 1829 | CAGGUAC CUGAUGAG X CGAA AUACCAC | GUGGUAU C GUACCUG |
| 108 | HCV-1832 | 1832 | ACGCAGG CUGAUGAG X CGAA ACGAUAC | GUAUCGU A CCUGCGU |
| 109 | HCV-1840 | 1840 | CACCUGC CUGAUGAG X CGAA ACGCAGG | CCUGCGU C GCAGGUG |
| 110 | HCV-1854 | 1854 | UACACUG CUGAUGAG X CGAA ACCACAC | GUGUGGU C CAGUGUA |
| 111 | HCV-1883 | 1883 | CCACUAC CUGAUGAG X CGAA ACAGGGC | GCCCUGU U GUAGUGG |
| 112 | HCV-1886 | 1886 | UCCCCAC CUGAUGAG X CGAA ACAACAG | CUGUUGU A GUGGGGA |
| 113 | HCV-1902 | 1902 | CCGGACC CUGAUGAG X CGAA AUCGGUC | GACCGAU C GGUCCGG |
| 114 | HCV-1906 | 1906 | GGCACCG CUGAUGAG X CGAA ACCGAUC | GAUCGGU C CGGUGCC |
| 115 | HCV-1917 | 1917 | UUAUACG CUGAUGAG X CGAA AGGGGCA | UGCCCCU A CGUAUAA |
| 116 | HCV-1921 | 1921 | CCAGUUA CUGAUGAG X CGAA ACGUAGG | CCUACGU A UAACUGG |
| 117 | HCV-1923 | 1923 | CCCCAGU CUGAUGAG X CGAA AUACGUA | UACGUAU A ACUGGGG |
| 118 | HCV-1990 | 1990 | ACAGCCA CUGAUGAG X CGAA ACCAGUU | AACUGGU U UGGCUGU |
| 119 | HCV-1991 | 1991 | UACAGCC CUGAUGAG X CGAA AACCAGU | ACUGGUU U GGCUGUA |
| 120 | HCV-1998 | 1998 | AUCCAUG CUGAUGAG X CGAA ACAGCCA | UGGCUGU A CAUGGAU |
| 121 | HCV-2043 | 2043 | UUGCACG CUGAUGAG X CGAA AGGGCCC | GGGCCCU C CGUGCAA |
| 122 | HCV-2054 | 2054 | CCCCCCC CUGAUGAG X CGAA AUGUUGC | GCAACAU C GGGGGGG |
| 123 | HCV-2063 | 2063 | GGUUGCC CUGAUGAG X CGAA ACCCCCC | GGGGGGU C GGCAACC |
| 124 | HCV-2072 | 2072 | UCAAGGU CUGAUGAG X CGAA AGGUUGC | GCAACCU C ACCUUGA |
| 125 | HCV-2077 | 2077 | GCAGGUC CUGAUGAG X CGAA AGGUGAG | CUCACCU U GACCUGC |
| 126 | HCV-2121 | 2121 | UUUGUGU CUGAUGAG X CGAA AGUGGCC | GGCCACU U ACACAAA |
| 127 | HCV-2122 | 2122 | UUUUGUG CUGAUGAG X CGAA AAGUGGC | GCCACUU A CACAAAA |
| 128 | HCV-2137 | 2137 | UGGCCCC CUGAUGAG X CGAA AGCCACA | UGUGGCU C GGGGCCA |
| 129 | HCV-2149 | 2149 | AGGUGUU CUGAUGAG X CGAA ACCAUGG | CCAUGGU U AACACCU |
| 130 | HCV-2150 | 2150 | UAGGUGU CUGAUGAG X CGAA AACCAUG | CAUGGUU A ACACCUA |
| 131 | HCV-2219 | 2219 | CCUUAAA CUGAUGAG X CGAA AUGGUAA | UUACCAU C UUUAAGG |
| 132 | HCV-2221 | 2221 | AACCUUA CUGAUGAG X CGAA AGAUGGU | ACCAUCU U UAAGGUU |
| 133 | HCV-2261 | 2261 | CAGCACU CUGAUGAG X CGAA AGCCUGU | ACAGGCU U AGUGCUG |
| 134 | HCV-2262 | 2262 | GCAGCAC CUGAUGAG X CGAA AAGCCUG | CAGGCUU A GUGCUGC |
| 135 | Hcv-2295 | 2295 | AGGUCGC CUGAUGAG X CGAA ACGCUCU | AGAGCGU U GCGACCU |
| 136 | HCV-2320 | 2320 | GAGCUCC CUGAUGAG X CGAA AUCUGUC | GACAGAU C GGAGCUC |
| 137 | HCV-2327 | 2327 | GCGGGCU CUGAUGAG X CGAA AGCUCCG | CGGAGCU C AGCCCGC |
| 138 | HCV-2344 | 2344 | UGUCGUG CUGAUGAG X CGAA ACAGGAG | CUGCUGU C CACGACA |
| 139 | HCV-2417 | 2417 | UCUGAUG CUGAUGAG X CGAA AGGUGGA | UCCACCU C CAUCAGA |
| 140 | HCV-2421 | 2421 | AUGUUCU CUGAUGAG X CGAA AUGGAGG | CCUCCAU C AGAACAU |
| 141 | HCV-2429 | 2429 | CGUCCAC CUGAUGAG X CGAA AUGUUCU | AGAACAU C GUGGACG |
| 142 | HCV-2534 | 2534 | AGGCACA CUGAUGAG X CGAA ACGCGCG | CGCGCGU C UGUGCCU |
| 143 | HCV-2585 | 2585 | GGUUCUC CUGAUGAG X CGAA AGGGCGG | CCGCCCU A GAGAACC |
| 144 | HCV-2600 | 2600 | CGUUGAG CUGAUGAG X CGAA ACCACCA | UGGUGGU C CUCAACG |
| 145 | HCV-2603 | 2603 | CCGCGUU CUGAUGAG X CGAA AGGACCA | UGGUCCU C AACGCGG |
| 146 | HCV-2673 | 2671 | CUUGAUG CUGAUGAG X CGAA ACCAGGC | GCCUGGU A CAUCAAG |
| 147 | ECV-2675 | 2675 | UGCCCUU CUGAUGAG X CGAA AUGUACC | GGUACAU C AAGGGCA |
| 148 | HCV-2690 | 2690 | CCCCAGG CUGAUGAG X CGAA ACCAGCC | GGCUGGU C CCUGGGG |
| 149 | HCV-2704 | 2704 | CAGAGCA CUGAUGAG X CGAA AUGCCGC | GCGGCAU A UGGUCUG |
| 150 | HCV-2709 | 2709 | CCGUACA CUGAUGAG X CGAA AGCAUAU | AUAUGCU C UGUACGG |
| 151 | HCV-2713 | 2713 | CACGCCG CUGAUGAG X CGAA ACAGAGC | GCUCUGU A CGGCGUG |
| 152 | HCV-2738 | 2738 | CCAGCAG CUGAUGAG X CGAA AGCAGGA | UCCUGCU C CUGCUGG |
| 153 | HCV-2763 | 2763 | AUGGCGU CUGAUGAG X CGAA AGCCCGU | ACGGGCU U ACGCCAU |
| 154 | HCV-2764 | 2764 | CAUGGCG CUGAUGAG X CGAA AAGCCCG | CGGGCUU A CGCCAUG |
| 155 | HCV-2878 | 2878 | GUAUUGU CUGAUGAG X CGAA ACCACCA | UGGUGGU U ACAAUAC |
| 156 | HCV-2879 | 2879 | AGUAUUG CUGAUGAG X CGAA AACCACC | GGUGGUU A CAAUACU |
| 157 | HCV-2884 | 2884 | GAUAAAG CUGAUGAG X CGAA AUUGUAA | UUACAAU A CUUUAUC |
| 158 | HCV-2887 | 2887 | GGUGAUA CUGAUGAG X CGAA AGUAUUG | CAAUACU U UAUCACC |
| 159 | HCV-2888 | 2888 | UGGUGAU CUGAUGAG X CGAA AAGUAUU | AAUACUU U AUCACCA |
| 160 | HCV-2910 | 2910 | ACGCACA CUGAUGAG X CGAA AUGCGCC | GGCGCAU U UGUGCGU |
| 161 | HCV-2911 | 2911 | CACGCAC CUGAUGAG X CGAA AAUGCGC | GCGCAUU U GUGCGUG |
| 162 | HCV-2924 | 2924 | GAGGGGG CUGAUGAG X CGAA ACCCACA | UGUGGGU C CCCCCUC |
| 163 | HCV-2931 | 2933 | ACAUUGA CUGAUGAG X CGAA AGGGGGG | CCCCCCU C UCAAUGU |
| 164 | HCV-2933 | 2933 | GGACAUU CUGAUGAG X CGAA AGAGGGG | CCCCUCU C AAUGUCC |
| 165 | HCV-2939 | 2939 | CCCCCCG CUGAUGAG X CGAA ACAUUGA | UCAAUGU C CGGGGGG |
| 166 | HCV-2958 | 2958 | AGGAUGA CUGAUGAG X CGAA AGCAUCG | CGAUGCU A UCAUCCU |
| 167 | HCV-2960 | 2960 | GGAGGAU CUGAUGAG X CGAA AUAGCAU | AUGCUAU C AUCCUCC |
| 168 | HCV-2963 | 2963 | UGAGGAG CUGAUGAG X CGAA AUGAUAG | CUAUCAU C CUCCUCA |
| 169 | HCV-2966 | 2966 | AUGUGAG CUGAUGAG X CGAA AGGAUGA | UCAUCCU C CUCACAU |
| 170 | HCV-2969 | 2969 | CACAUGU CUGAUGAG X CGAA AGGAGGA | UCCUCCU C ACAUGUG |
| 171 | HCV-3059 | 3059 | UCGCAGU CUGAUGAG X CGAA AUGGCAG | CUGCCAU A ACUGCGA |
| 172 | HCV-3138 | 3138 | UGGACGU CUGAUGAG X CGAA AUGGCCU | AGGCCAU U ACGUCCA |
| 173 | HCV-3139 | 3139 | UUGGACG CUGAUGAG X CGAA AAUGGCC | GGCCAUU A CGUCCAA |
| 174 | HCV-3143 | 3143 | CCAUUUG CUGAUGAG X CGAA ACGUAAU | AUUACGU C CAAAUGG |
| 175 | HCV-3154 | 3154 | CUUCAUG CUGAUGAG X CGAA AGGCCAU | AUGGCCU U CAUGAAG |
| 176 | HCV-3155 | 3155 | GCUUCAU CUGAUGAG X CGAA AAGGCCA | UGGCCUU C AUGAAGC |
| 177 | HCV-3209 | 3209 | AAUCCUG CUGAUGAG X CGAA AGCGGGG | CCCCGCU A CAGGAUU |
| 178 | HCV-3216 | 3216 | UGGGCCC CUGAUGAG X CGAA AUCCUGU | ACAGGAU U GGGCCCA |
| 179 | HCV-3233 | 3233 | GGUCUCG CUGAUGAG X CGAA AGGCCCG | CGGGCCU A CGAGACC |
| 180 | HCV-3242 | 3242 | CCACCGC CUGAUGAG X CGAA AGGUCUC | GAGACCU U GCGGUGG |
| 181 | HCV-3263 | 3263 | AGAAGAC CUGAUGAG X CGAA ACGGGCU | AGCCCGU C GUCUUCU |
| 182 | HCV-3266 | 3266 | CAGAGAA CUGAUGAG X CGAA ACGACGG | CCGUCGU C UUCUCUG |
| 183 | HCV-3268 | 3268 | GUCAGAG CUGAUGAG X CGAA AGACGAC | GUCGUCU U CUCUGAC |
| 184 | HCV-3290 | 3290 | AGGUGAU CUGAUGAG X CGAA AUCUUGG | CCAAGAU C AUCACCU |
| 185 | HCV-3293 | 3293 | CCCAGGU CUGAUGAG X CGAA AUGAUCU | AGAUCAU C ACCUGGG |
| 186 | HCV-3329 | 3329 | CCAAGAU CUGAUGAG X CGAA AUGUCCC | GGGACAU C AUCUUGG |
| 187 | HCV-3332 | 3332 | GUCCCAA CUGAUGAG X CGAA AUGAUGU | ACAUCAU C UUGGGAC |
| 188 | HCV-3334 | 3334 | CAGUCCC CUGAUGAG X CGAA AGAUGAU | AUCAUCU U GGGACUG |
| 189 | HCV-3347 | 3347 | GGGCGGA CUGAUGAG X CGAA ACGGGCA | UGCCCGU C UCCGCCC |
| 190 | HCV-3349 | 3349 | UCGGGCG CUGAUGAG X CGAA AGACGGG | CCCGUCU C CGCCCGA |
| 191 | HCV-3371 | 3371 | CCAGAAG CUGAUGAG X CGAA AUCUCCC | GGGAGAU A CUUCUGG |
| 192 | HCV-3416 | 3416 | GGGCAAG CUGAUGAG X CGAA AGUCGCC | GGCGACU C CUUGCCC |
| 193 | HCV-3419 | 3419 | UGGGGGC CUGAUGAG X CGAA AGGAGUC | GACUCCU U GCCCCCA |
| 194 | HCV-3428 | 3428 | AGGCCGU CUGAUGAG X CGAA AUGGGGG | CCCCCAU C ACGGCCU |
| 195 | HCV-3482 | 3482 | GGCCUGU CUGAUGAG X CGAA AGGCUAG | CUAGCCU C ACAGGCC |
| 196 | HCV-3518 | 3518 | CCACUUG CUGAUGAG X CGAA ACCUCCC | GGGAGGU U CAAGUGG |
| 197 | HCV-3519 | 3519 | ACCACUU CUGAUGAG X CGAA AACCUCC | GGAGGUU C AAGUGGU |
| 198 | HCV-3527 | 3527 | CGGUGGA CUGAUGAG X CGAA ACCACUU | AAGUGGU U UCCACCG |
| 199 | HCV-3528 | 3528 | GCGGUGG CUGAUGAG X CGAA AACCACU | AGUGGUU U CCACCGC |
| 200 | HCV-3529 | 3529 | UGCGGUG CUGAUGAG X CGAA AAACCAC | GUGGUUU C CACCGCA |
| 201 | HCV-3576 | 3576 | ACGGUCC CUGAUGAG X CGAA ACACACA | UGUGUGU U GGACCGU |
| 202 | HCV-3601 | 3601 | GGUCUUU CUGAUGAG X CGAA AGCCGGC | GCCGGCU C AAAGACC |
| 203 | HCV-3611 | 3611 | GGCCGGC CUGAUGAG X CGAA AGGGUCU | AGACCCU A GCCGGCC |
| 204 | HCV-3684 | 3684 | GCCCCGG CUGAUGAG X CGAA AGGCGCA | UGCGCCU C CCGGGGC |
| 205 | HCV-3696 | 3696 | GUAAGGG CUGAUGAG X CGAA ACGCGCC | GGCGCGU U CCCUUAC |
| 206 | HCV-3697 | 3697 | UGUAAGG CUGAUGAG X CGAA AACGCGC | GCGCGUU C CCUUACA |
| 207 | HCV-3701 | 3701 | AUGGUGU CUGAUGAG X CGAA AGGGAAC | GUUCCCU U ACACCAU |
| 208 | HCV-3702 | 3702 | CAUGGUG CUGAUGAG X CGAA AAGGGAA | UUCCCUU A CACCAUG |
| 209 | HCV-3724 | 3724 | GAGGUCC CUGAUGAG X CGAA AGCUACC | GGUAGCU C GGACCUC |
| 210 | HCV-3731 | 3731 | CCAGAUA CUGAUGAG X CGAA AGGUCCG | CGGACCU C UAUCUGG |
| 211 | HCV-3733 | 3733 | GACCAGA CUGAUGAG X CGAA AGAGGUC | GACCUCU A UCUGGUC |
| 212 | HCV-3735 | 3735 | GUGACCA CUGAUGAG X CGAA AUAGAGG | CCUCUAU C UGGUCAC |
| 213 | HCV-3740 | 3740 | GUCUCGU CUGAUGAG X CGAA ACCAGAU | AUCUGGU C ACGAGAC |
| 214 | HCV-3761 | 3761 | GCACCGG CUGAUGAG X CGAA AUGACGU | ACGUCAU U CCGGUGC |
| 215 | HCV-3762 | 3762 | CGCACCG CUGAUGAG X CGAA AAUGACG | CGUCAUU C CGGUGCG |
| 216 | HCV-3786 | 3786 | CUCCCCC CUGAUGAG X CGAA ACCGUCA | UGACGGU C GGGGGAG |
| 217 | HCV-3797 | 3797 | GGGACAG CUGAUGAG X CGAA AGGCUCC | GGAGCCU A CUGUCCC |
| 218 | HCV-3802 | 3802 | UCUGGGG CUGAUGAG X CGAA ACAGUAG | CUACUGU C CCCCAGA |
| 219 | HCV-3835 | 3835 | GCCACCC CUGAUGAG X CGAA AAGAGCC | GGCUCUU C GGGUGGC |
| 220 | HCV-3851 | 3851 | AAGGGCA CUGAUGAG X CGAA AGGAGUG | CACUGCU C UGCCCUU |
| 221 | HCV-3858 | 3858 | UGCCCCG CUGAUGAG X CGAA AGGGCAG | CUGCCCU U CGGGGCA |
| 222 | HCV-3859 | 3859 | GUGCCCC CUGAUGAG X CGAA AAGGGCA | UGCCCUU C GGGGCAC |
| 223 | HCV-3872 | 3872 | AGAUGCC CUGAUGAG X CGAA ACAGCGU | ACGCUGU A GGCAUCU |
| 224 | HCV-3878 | 3878 | CCCGGAA CUGAUGAG X CGAA AUGCCUA | UAGGGAU C UUCCGGG |
| 225 | HCV-3880 | 3880 | AGCCCGG CUGAUGAG X CGAA AGAUGCC | GGCAUCU U CCGGGCU |
| 226 | HCV-3881 | 3881 | CAGCCCG CUGAUGAG X CGAA AAGAUGC | GCAUCUU C CGGGCUG |
| 227 | HCV-3908 | 3908 | CCUUCGC CUGAUGAG X CGAA ACCCCCC | GGGGGGU U GCGAAGG |
| 228 | HCV-4056 | 4056 | GGCACUU CUGAUGAG X CGAA AGUGCUC | GAGCACU A AAGUGCC |
| 229 | HCV-4072 | 4072 | GGCUGCG CUGAUGAG X CGAA ACGCAGC | GCUGCGU A CGCAGCC |
| 230 | HCV-4087 | 4087 | UACCUUG CUGAUGAG X CGAA ACCCUUG | CAAGGGU A CAAGGUA |
| 231 | HCV-4115 | 4115 | UGGCGGC CUGAUGAG X CGAA ACAGAUG | CAUCUGU U GCCGCCA |
| 232 | HCV-4175 | 4175 | CAGUUCU CUGAUGAG X CGAA AUGUUGG | CCAACAU C AGAACUG |
| 233 | HCV-4187 | 4187 | UGGUCCU CUGAUGAG X CGAA ACCCCAG | CUGGGGU A AGGACCA |
| 234 | HCV-4228 | 4228 | CUUACCA CUGAUGAG X CGAA AGGUGGA | UCCACCU A UGGUAAG |
| 235 | HCV-4233 | 4233 | AGGAACU CUGAUGAG X CGAA ACCAUAG | CUAUGGU A AGUUCCU |
| 236 | HCV-4237 | 4237 | GGCAAGG CUGAUGAG X CGAA ACUUACC | GGUAAGU U CCUUGCC |
| 237 | HCV-4238 | 4238 | CGGCAAG CUGAUGAG X CGAA AACUUAC | GUAAGUU C CUUGCCG |
| 238 | HCV-4241 | 4241 | CGUCGGC CUGAUGAG X CGAA AGGAACU | AGUUCCU U GCCGACG |
| 239 | HCV-4280 | 4280 | CACAUAU CUGAUGAG X CGAA AUGAUAU | AUAUCAU A AUAUGUG |
| 240 | HCV-4283 | 4283 | CAUCACA CUGAUGAG X CGAA AUUAUGA | UCAUAAU A UGUGAUG |
| 241 | HCV-4337 | 4337 | GGUCCAG CUGAUGAG X CGAA ACUGUGC | GCACAGU C CUGGACC |
| 242 | HCV-4370 | 4370 | GCACGAC CUGAUGAG X CGAA AGCCGCG | CGCGGCU C GUCGUGC |
| 243 | HCV-4373 | 4373 | CGAGCAC CUGAUGAG X CGAA ACGAGCC | GGCUCGU C GUGCUCG |
| 244 | HCV-4379 | 4379 | CGGUGGC CUGAUGAG X CGAA AGCACGA | UCGUGCU C GCCACCG |
| 245 | HCV-4425 | 4425 | UCCUCAA CUGAUGAG X CGAA AUUUGGG | CCCAAAU A UUGAGGA |
| 246 | HCV-4444 | 4444 | AGUGUUG CUGAUGAG X CGAA ACAGAGC | GCUCUGU C CAACACU |
| 247 | HCV-4460 | 4460 | AGAAGGG CUGAUGAG X CGAA AUCUCUC | GAGAGAU C CCCUUCU |
| 248 | HCV-4481 | 4481 | CGAGGGG CUGAUGAG X CGAA AUGGCCU | AGGCCAU C CCCCUCG |
| 249 | HCV-4487 | 4487 | UGGCCUC CUGAUGAG X CGAA AGGGGGA | UCCCCCU C GAGGCCA |
| 250 | HCV-4496 | 4496 | CCCCCUU CUGAUGAG X CGAA AUGGCCU | AGGCCAU C AAGGGGG |
| 251 | HCV-4528 | 4528 | CUUCUUG CUGAUGAG X CGAA AGUGGCA | UGCCACU C CAAGAAG |
| 252 | HCV-4577 | 4577 | CGGCAUU CUGAUGAG X CGAA AUUCCGA | UCGGAAU C AAUGCCG |
| 253 | HCV-4586 | 4586 | AAUACGC CUGAUGAG X CGAA ACGGCAU | AUGCCGU A GCGUAUU |
| 254 | HCV-4591 | 4591 | CCGGUAA CUGAUGAG X CGAA ACGCUAC | GUAGCGU A UUACCGG |
| 255 | HCV-4593 | 4593 | CCCCGGU CUGAUGAG X CGAA AUACGCU | AGCGUAU U ACCGGGG |
| 256 | HCV-4594 | 4594 | ACCCCGG CUGAUGAG X CGAA AAUACGC | GCGUAUU A CCGGGGU |
| 257 | HCV-4616 | 4616 | UCGGUAU CUGAUGAG X CGAA ACGGACA | UGUCCGU C AUACCGA |
| 258 | HCV-4619 | 4619 | UAGUCGG CUGAUGAG X CGAA AUGACGG | CCGUCAU A CCGACUA |
| 259 | HCV-4626 | 4626 | UCUCCGC CUGAUGAG X CGAA AGUCGGU | ACCGACU A GCGGAGA |
| 260 | HCV-4672 | 4672 | ACCGGUG CUGAUGAG X CGAA AGCCCGU | ACGGGCU A CACCGGU |
| 261 | HCV-4697 | 4697 | UGCAGUC CUGAUGAG X CGAA AUCACCG | CGGUGAU C GACUGCA |
| 262 | HCV-4789 | 4789 | UGAGCGC CUGAUGAG X CGAA ACACCGC | GCGGUGU C GCGCUCA |
| 263 | HCV-4795 | 4795 | CCGUUGU CUGAUGAG X CGAA AGCGCGA | UCGCGCU C ACAACGG |
| 264 | HCV-4920 | 4920 | UCAUACC CUGAUGAG X CGAA AGCACAG | CUGUGCU U GGUAUGA |
| 265 | HCV-4924 | 4924 | GAGCUCA CUGAUGAG X CGAA ACCAAGC | GCUUGGU A UGAGCUC |
| 266 | HCV-4931 | 4931 | CGGGCGU CUGAUGAG X CGAA AGCUCAU | AUGAGCU C ACGCCCG |
| 267 | HCV-4947 | 4947 | CUGACUG CUGAUGAG X CGAA AGUCUCA | UGAGACU A CAGUCAG |
| 268 | HCV-4952 | 4952 | GCAACCU CUGAUGAG X CGAA ACUGUAG | CUACAGU C AGGUUGC |
| 269 | HCV-4957 | 4957 | AGCCCGC CUGAUGAG X CGAA ACCUGAC | GUCAGGU U GCGGGCU |
| 270 | HCV-4965 | 4965 | UUCAGGU CUGAUGAG X CGAA AGCCCGC | GCGGGCU U ACCUGAA |
| 271 | HCV-4966 | 4966 | AUUCAGG CUGAUGAG X CGAA AAGCCCG | CGGGCUU A CCUGAAU |
| 272 | HCV-4974 | 4974 | CCUGGUG CUGAUGAG X CGAA AUUCAGG | CCUGAAU A CACCAGG |
| 273 | HCV-4984 | 4984 | GACGGGC CUGAUGAG X CGAA ACCCUGG | CCAGGGU U GCCCGUC |
| 274 | HCV-4991 | 4991 | CCUGGCA CUGAUGAG X CGAA ACGGGCA | UGCCCGU C UGGCAGG |
| 275 | HCV-5004 | 5004 | AACUCCA CUGAUGAG X CGAA AUGGUCC | GGACCAU C UGGAGUU |
| 276 | HCV-5102 | 5102 | GGUAUGC CUGAUGAG X CGAA ACCAGGU | ACCUGGU A GCAUACC |
| 277 | HCV-5107 | 5107 | GGCUUGG CUGAUGAG X CGAA AUGGUAC | GUAGCAU A CCAAGCC |
| 278 | HCV-5133 | 5133 | GGAGCCU CUGAUGAG X CGAA AGCCCUG | CAGGGCU C AGGCUCC |
| 279 | HCV-5218 | 5218 | UAGCCUA CUGAUGAG X CGAA ACAGGAG | CUGCUGU A UAGGCUA |
| 280 | HCV-5220 | 5220 | CCUAGCC CUGAUGAG X CGAA AUACAGC | GCUGUAU A GGCUAGG |
| 281 | HCV-5306 | 5306 | UAGUGAC CUGAUGAG X CGAA ACCUCCA | UGGAGGU C GUCACUA |
| 282 | HCV-5309 | 5309 | UGCUAGU CUGAUGAG X CGAA ACGACCU | AGGUCGU C ACUAGCA |
| 283 | HCV-5313 | 5313 | CAGGUGG CUGAUGAG X CGAA AGUGACG | CGUCACU A GCACCUG |
| 284 | HCV-5330 | 5330 | CUCCGCC CUGAUGAG X CGAA ACCAGGA | UGCUGGU A GGCGGAG |
| 285 | HCV-5339 | 5339 | CUGCAAG CUGAUGAG X CGAA ACUCCGC | GCGGAGU C CUUGCAG |
| 286 | HCV-5342 | 5342 | GAGCUGC CUGAUGAG X CGAA AGGACUC | GAGUCCU U GCAGCUC |
| 287 | HCV-5359 | 5359 | CAGGCAA CUGAUGAG X CGAA AUGCGGC | GCCGCAU A UUGCCUG |
| 288 | HCV-5361 | 5361 | GUCAGGC CUGAUGAG X CGAA AUAUGCG | CGCAUAU U GCCUGAC |
| 289 | HCV-5376 | 5376 | ACCACAC CUGAUGAG X CGAA ACCGGUU | AACCGGU A GUGUGGU |
| 290 | HCV-5399 | 5399 | ACAAAAU CUGAUGAG X CGAA AUCCUAC | GUAGGAU C AUUUUGU |
| 291 | HCV-5423 | 5423 | CGGGAAC CUGAUGAG X CGAA ACAGCCG | CGGCUGU U GUUCCCG |
| 292 | HCV-5426 | 5426 | UGUCGGG CUGAUGAG X CGAA ACAACAG | CUGUUGU U CCCGACA |
| 293 | HCV-5427 | 5427 | CUGUCGG CUGAUGAG X CGAA AACAACA | UGUUGUU C CCGACAG |
| 294 | HCV-5524 | 5524 | CUGCUUG CUGAUGAG X CGAA ACUCCUC | GAGCAGU U CAAGCAG |
| 295 | HCV-5525 | 5525 | UCUGCUU CUGAUGAG X CGAA AACUGCU | AGCAGUU C AAGCAGA |
| 296 | HCV-5583 | 5583 | ACCACGG CUGAUGAG X CGAA AGCAGCG | CGCUGCU C CCGUGGU |
| 297 | HCV-5596 | 5596 | CCACCUG CUGAUGAG X CGAA ACUCCAC | GUGGAGU C CAGGUGG |
| 298 | HCV-5612 | 5612 | AGGCCUC CUGAUGAG X CGAA AGGGCCC | GGGCCCU U GAGGCCU |
| 299 | HCV-5620 | 5620 | UGCCCAG CUGAUGAG X CGAA AGGCCUC | GAGGCCU U CUGGGCA |
| 300 | HCV-5621 | 5621 | UUGCCCA CUGAUGAG X CGAA AAGGCCU | AGGCCUU C UGGGCAA |
| 301 | HCV-5674 | 5674 | AGUGGAU CUGAUGAG X CGAA AGCCUGC | GCAGGCU U AUCCACU |
| 302 | HCV-5675 | 5675 | GAGUGGA CUGAUGAG X CGAA AAGCCUG | CAGGCUU A UCCACUC |
| 303 | HCV-5767 | 5767 | GAUGUUG CUGAUGAG X CGAA ACAGGAG | CUCCUGU U CAACAUC |
| 304 | HCV-5768 | 5768 | AGAUGUU CUGAUGAG X CGAA AACAGGA | UCCUGUU C AACAUCU |
| 305 | HCV-5801 | 5801 | GAGGAGC CUGAUGAG X CGAA AGUUGAG | CUCAACU C GCUCCUC |
| 306 | HCV-5805 | 5805 | CUGGGAG CUGAUGAG X CGAA AGCGAGU | ACUCGCU C CUCCCAG |
| 307 | HCV-5821 | 5821 | GAAGGCC CUGAUGAG X CGAA AAGCAGC | GCUGCUU C GGCCUUC |
| 308 | HCV-5827 | 5827 | GCCCACG CUGAUGAG X CGAA AGGCCGA | UCGGCCU U CGUGGGC |
| 309 | HCV-5828 | 5828 | CGGCCAC CUGAUGAG X CGAA AAGGCCG | CGGCCUU C GUGGGCG |
| 310 | HCV-5843 | 5843 | CACCGGC CUGAUGAG X CGAA AUGCCGG | CCGGCAU U GCCGGUG |
| 311 | HCV-5858 | 5858 | UGCUGCC CUGAUGAG X CGAA AUGGCCG | CGGCCAU U GGCAGGA |
| 312 | HCV-5867 | 5867 | CAAGGCC CUGAUGAG X CGAA AUGCUGC | GCAGCAU A GGCCUUG |
| 313 | HCV-5873 | 5873 | CCUUCCC CUGAUGAG X CGAA AGGCCUA | UAGGCCU U GGGAAGG |
| 314 | HCV-5905 | 5905 | CGCUCCA CUGAUGAG X CGAA AGCCCGG | GGGGGCU A UGGAGCG |
| 315 | HCV-5930 | 5930 | AAGCCAC CUGAUGAG X CGAA AGUGGAC | GUGCACU C GUGGCUU |
| 316 | HCV-5937 | 5937 | ACCUUAA CUGAUGAG X CGAA AGGCACG | CGUGGCU U UUAAGGU |
| 317 | HCV-5938 | 5938 | GACCUUA CUGAUGAG X CGAA AAGCCAC | GUGGCUU U UAAGGUC |
| 318 | HCV-5939 | 5939 | UGACCUU CUGAUGAG X CGAA AAAGCCA | UGGCUUU U AAGGUCA |
| 319 | HCV-5940 | 5940 | AUGACCU CUGAUGAG X CGAA AAAAGCC | GGCUUUU A AGGUCAU |
| 320 | HCV-5945 | 5945 | CGCUCAU CUGAUGAG X CGAA ACCUUAA | UUAAGGU C AUGAGCG |
| 321 | HCV-5965 | 5965 | CUCGGCG CUGAUGAG X CGAA AGGGCGC | GCGCCCU C CGCCGAG |
| 322 | HCV-5981 | 5981 | GCAAGUU CUGAUGAG X CGAA ACCAGGU | ACCUGGU U AACUUGC |
| 323 | HCV-5982 | 5982 | AGCAAGU CUGAUGAG X CGAA AACCAGG | CCUGGUU A ACUUGCU |
| 324 | HCv-5990 | 5990 | UGGCAGG CUGAUGAG X CGAA AGCAAGU | ACUUGCU C CCUGCCA |
| 325 | HCV-6004 | 6004 | GCCGGGG CUGAUGAG X CGAA AGAGGAU | AUCCUCU C CCCCGGC |
| 326 | HCV-6020 | 6020 | CCCCGAC CUGAUGAG X CGAA ACCAGGG | CCCUGGU C GUCGGGG |
| 327 | HCV-6023 | 6023 | CGACCCC CUGAUGAG X CGAA ACGACCA | UGGUCGU C GGGGUCG |
| 328 | HCV-6029 | 6029 | CACACAC CUGAUGAG X CGAA ACCCCGA | UCGGGGU C GUGUGUG |
| 329 | HCV-6044 | 6044 | GACGCAG CUGAUGAG X CGAA AUUGCUG | CAGCAAU C CUGCGUC |
| 330 | HCV-6051 | 6051 | ACGUGCC CUGAUGAG X CGAA ACGCAGG | CCUGCGU C GGCACGU |
| 331 | HCV-6106 | 6106 | CGAAGCG CUGAUGAG X CGAA ACGCUAU | AUAGCGU U CGCUUCG |
| 332 | HCV-6107 | 6107 | GCGAAGC CUGAUGAG X CGAA AACGCUA | UAGCGUU C GCUUCGC |
| 333 | HCV-6111 | 6111 | CCCCGCG CUGAUGAG X CGAA AGCGAAC | GUUCGCU U CGCGGGG |
| 334 | HCV-6413 | 6413 | UUUGCAU CUGAUGAG X CGAA AUGCCGU | ACGGCAU C AUGCAAA |
| 335 | HCV-6574 | 6574 | CCUGGAA CUGAUGAG X CGAA AGUUCGG | CCGAACU A UUCCAGG |
| 336 | HCV-6576 | 6576 | GCCCUGG CUGAUGAG X CGAA AUAGUUC | GAACUAU U CCAGGGC |
| 337 | HCV-6577 | 6577 | CGCCCUG CUGAUGAG X CGAA AAUAGUU | AACUAUU C CAGGGCG |
| 338 | HCV-6637 | 6637 | GUAGUGG CUGAUGAG X CGAA AGUCCCC | GGGGACU U CCACUAC |
| 339 | HCV-6638 | 6638 | CGUAGUG CUGAUGAG X CGAA AAGUCCC | GGGACUU C CACUACG |
| 340 | HCV-6643 | 6643 | CGUCACG CUGAUGAG X CGAA AGUGGAA | UUCCACU A CGUGACG |
| 341 | HCV-6671 | 6671 | GGCAUUU CUGAUGAG X CGAA ACGUUGU | ACAACGU A AAAUGCC |
| 342 | HCV-6703 | 6703 | GGUGAAG CUGAUGAG X CGAA AUUCCGG | CCCGAAU U CUUCACC |
| 343 | HCV-6704 | 6704 | CGGUGAA CUGAUGAG X CGAA AAUUCGG | CCGAAUU C UUCACCG |
| 344 | HCV-6706 | 6706 | UUCGGUG CUGAUGAG X CGAA AGAAUUC | GAAUUCU U CACCGAA |
| 345 | HCV-6707 | 6707 | AUUCGGU CUGAUGAG X CGAA AAGAAUU | AAUUCUU C ACCGAAU |
| 346 | HCV-6715 | 6715 | CCCGUCC CUGAUGAG X CGAA AUUCGGU | ACCGAAU U GGACGGG |
| 347 | HCV-6730 | 6730 | CCUGUGC CUGAUGAG X CGAA ACCGCAC | GUGCCGU U GCACAGG |
| 348 | HCV-6739 | 6739 | CGGAGCG CUGAUGAG X CGAA ACCUGUG | CACAGGU A CGCUCCG |
| 349 | HCV-6744 | 6744 | CACGCCG CUGAUGAG X CGAA AGCGUAC | GUACGCU C CGGCGUG |
| 350 | HCV-6759 | 6759 | CGUAGGA CUGAUGAG X CGAA AGGUCUG | CAGACCU C UCCUACG |
| 351 | HCV-6761 | 6761 | CCCGUAG CUGAUGAG X CGAA AGAGGUC | GACCUCU C CUACGGG |
| 352 | HCV-6764 | 6764 | CCUCCCG CUGAUGAG X CGAA AGGAGAG | CUCUCCU A CGGGAGG |
| 353 | HCV-6776 | 6776 | GGAAUGU CUGAUGAG X CGAA ACAUCCU | AGGAUGU C ACAUUCC |
| 354 | HCV-6782 | 6782 | CGACCUG CUGAUGAG X CGAA AAUGUGA | UCACAUU C CAGGUCG |
| 355 | HCV-6788 | 6788 | UGACCGC CUGAUGAG X CGAA ACCUGGA | UCCAGGU C GGGCUCA |
| 356 | HCV-6794 | 6794 | AUUGGUU CUGAUGAG X CGAA AGCCCGA | UCGGGCU C AACCAAU |
| 357 | HCV-6802 | 6802 | AACCAGG CUGAUGAG X CGAA AUUGGUU | AACCAAU A CCUGGUU |
| 358 | HCV-6809 | 6809 | GUGACCC CUGAUGAG X CGAA ACCAGGU | ACCUGGU U GGGUCAC |
| 359 | HCV-6814 | 6814 | GAGCUGU CUGAUGAG X CGAA ACCCAAC | GUUGGGU C ACAGCUC |
| 360 | HCV-6821 | 6821 | CGCAUGG CUGAUGAG X CGAA AGCUGUG | CACAGCU C CCAUGCG |
| 361 | HCV-6906 | 6906 | GCCAGCC CUGAUGAG X CGAA ACGUUUA | UAAACGU A GGCUGGC |
| 362 | HCV-6922 | 6922 | GGGGGGA CUGAUGAG X CGAA ACCCCCU | AGGGGGU C UCCCCCC |
| 363 | HCV-6924 | 6924 | GAGGGGG CUGAUGAG X CGAA AGACCCC | GGGGUCU C CCCCCUC |
| 364 | HCV-6931 | 6931 | GGCCAAG CUGAUGAG X CGAA AGGGGGG | CCCCCCU C CUUGGCC |
| 365 | HCV-6934 | 6934 | GCUGGCC CUGAUGAG X CGAA AGGAGGG | CCCUCCU U GGCCAGC |
| 366 | HCV-6943 | 6943 | AGCUGAA CUGAUGAG X CGAA AGCUCGC | GCCAGCU C UUCAGCU |
| 367 | HCV-6958 | 6953 | CGCAGAC CUGAUGAG X CGAA AUUGGCU | AGCCAAU U GUCUGCG |
| 368 | HCV-6961 | 6961 | AGGCGCA CUGAUGAG X CGAA ACAAUUG | CAAUUGU C UGCGCCU |
| 369 | HCV-7034 | 7034 | GCCACAG CUGAUGAG X CGAA AGGUUGG | CCAACCU C CUGUGGC |
| 370 | HCV-7118 | 7118 | CCGCUCG CUGAUGAG X CGAA AGCGGGU | ACCCGCU U CGAGCGG |
| 371 | HCV-7119 | 7119 | UCCGCUC CUGAUGAG X CGAA AAGCGGG | CCCGCUU C GAGGGGA |
| 372 | HCV-7145 | 7145 | CAACGGA CUGAUGAG X CGAA ACUUCCC | GGGAAGU A UCCGUUG |
| 373 | HCV-7195 | 7195 | UAUGGGC CUGAUGAG X CGAA ACGCGGG | CCCGCGU U GCCCAUA |
| 374 | HCV-7202 | 7202 | GUGCCCA CUGAUGAG X CGAA AUGGGCA | UGCCCAU A UGGGCAC |
| 375 | HCV-7218 | 7218 | GGGUUGU CUGAUGAG X CGAA AUCCGGG | CCCGGAU U ACAACCC |
| 376 | HCV-7219 | 7219 | AGGGUUG CUGAUGAG X CGAA AAUCCGG | CCGGAUU A CAACCCU |
| 377 | HCV-7234 | 7234 | GGACUCU CUGAUGAG X CGAA ACAGUGG | CCACUGU U AGAGUCC |
| 378 | HCV-7235 | 7235 | AGGACUC CUGAUGAG X CGAA AACAGUG | CACUGUU A GAGUCCU |
| 379 | HCV-7251 | 7251 | UAGUCCG CUGAUGAG X CGAA ACUUUUC | GAAAAGU C CGGACUA |
| 380 | HCV-7258 | 7258 | AGGGACG CUGAUGAG X CGAA AGUCCGG | CCGGACU A CGUCCCU |
| 381 | HCV-7262 | 7262 | CCGGAGG CUGAUGAG X CGAA ACGUAGU | ACUACGU C CCUCCGG |
| 382 | HCV-7266 | 7266 | ACCGCCG CUGAUGAG X CGAA AGGGACG | CGUCCCU C CGGCGGU |
| 383 | ECV-7288 | 7288 | AGGCGGC CUGAUGAG X CGAA AUGGGCA | UGCCCAU U GCCGCCU |
| 384 | HCV-7296 | 7296 | CCCGUGG CUGAUGAG X CGAA AGGCGGC | GCCGCCU A CCACGGG |
| 385 | HCV-7354 | 7354 | CACGGUG CUGAUGAG X CGAA ACUCUGU | ACAGAGU C CACCGUG |
| 386 | HCV-7386 | 7386 | GUCUUAG CUGAUGAG X CGAA AGCCAGC | GCUGGCU A CUAAGAC |
| 387 | HCV-7389 | 7389 | AAAGUCU CUGAUGAG X CGAA AGUAGCC | GGCUACU A AGACUUU |
| 388 | HCV-7395 | 7395 | CUGCCGA CUGAUGAG X CGAA AGUCUUA | UAAGACU U UCGGCAG |
| 389 | HCV-7396 | 7396 | GCUGCCG CUGAUGAG X CGAA AAGUCUU | AAGACUU U CGGCAGC |
| 390 | HCV-7397 | 7397 | AGCUGCC CUGAUGAG X CGAA AAAGUCU | AGACUUU C GGCAGCU |
| 391 | HCV-7411 | 7411 | GGCCGAC CUGAUGAG X CGAA AUCCGGA | UCCGGAU C GUCGGCC |
| 392 | HCV-7414 | 7414 | AACGGCC CUGAUGAG X CGAA ACGAUCC | GGAUCGU C GGCCGUU |
| 393 | HCV-7421 | 7421 | CGCUGUC CUGAUGAG X CGAA ACGGCCG | CGGCCGU U GACAGCG |
| 394 | HCV-7498 | 7498 | CAUGGAG CUGAUGAG X CGAA AGUACGA | UCGUACU C CUCCAUG |
| 395 | HCV-7501 | 7501 | GGGCAUG CUGAUGAG X CGAA AGGAGUA | UACUCCU C CAUGCCC |
| 396 | HCV-7514 | 7514 | CCCCCUC CUGAUGAG X CGAA AGGGGGG | CCCCCCU U GAGGGGG |
| 397 | HCV-7539 | 7539 | UCGCUGA CUGAUGAG X CGAA AUCAGGG | CCCUGAU C UCAGCGA |
| 398 | HCV-7541 | 7541 | CGUCGCU CUGAUGAG X CGAA AGAUCAG | CUGAUCU C AGCGACG |
| 399 | HCV-7552 | 7552 | AGACCAA CUGAUGAG X CGAA ACCCGUC | GACGGGU C UUGGUCU |
| 400 | HCV-7554 | 7554 | GUAGACC CUGAUGAG X CGAA AGACCCG | CGGGUCU U GGUCUAC |
| 401 | HCV-7558 | 7558 | CACGGUA CUGAUGAG X CGAA ACCAAGA | UCUUGGU C UACCGUG |
| 402 | HCV-7560 | 7560 | CUCACGG CUGAUGAG X CGAA AGACCAA | UUGGUCU A CCGUGAG |
| 403 | HCV-7589 | 7589 | AGCAGAC CUGAUGAG X CGAA AUGUCGU | ACGACAU C GUCUGCU |
| 404 | HCV-7592 | 7592 | AGCAGCA CUGAUGAG X CGAA ACGAUGU | ACAUCGU C UGCUGCU |
| 405 | HCV-7600 | 7600 | GGACAUU CUGAUGAG X CGAA AGCAGCA | UGCUGCU C AAUGUCC |
| 406 | HCV-7606 | 7606 | UGUGUAG CUGAUGAG X CGAA ACAUUGA | UCAAUGU C CUACACA |
| 407 | HCV-7667 | 7667 | ACGCGUU CUGAUGAG X CGAA AUGGGCA | UGCCCAU C AACGCGU |
| 408 | HCV-7723 | 7723 | ACUGCGG CUGAUGAG X CGAA AUGUUGU | ACAACAU C CCGCAGU |
| 409 | HCV-7775 | 7775 | CGUCCAG CUGAUGAG X CGAA ACUUGCA | UGCAAGU C CUGGACG |
| 410 | HCV-7789 | 7789 | GUCCCGG CUGAUGAG X CGAA AGUGGUC | GACCACU A CCGGGAC |
| 411 | HCV-7839 | 7839 | AGAAGUU CUGAUGAG X CGAA AGCCUUA | UAAGGCU A AACUUCU |
| 412 | HCV-7847 | 7847 | CUACGGA CUGAUGAG X CGAA AGAAGUU | AACUUCU A UCCGUAG |
| 413 | HCV-7849 | 7849 | UUCUACG CUGAUGAG X CGAA AUAGAAG | CUUCUAU C CGUAGAA |
| 414 | HCV-7853 | 7853 | CUUCUUC CUGAUGAG X CGAA ACGGAUA | UAUCCGU A GAAGAAG |
| 415 | HCV-7894 | 7894 | AAAUUUA CUGAUGAG X CGAA AUUUGGC | GCCAAAU C UAAAUUU |
| 416 | HCV-7896 | 7896 | CCAAAUU CUGAUGAG X CGAA AGAUUUG | CAAAUCU A AAUUUGG |
| 417 | HCV-7900 | 7900 | AUAGCCA CUGAUGAG X CGAA AUUUAGA | UCUAAAU U UGGCUAU |
| 418 | HCV-7901 | 7901 | CAUAGCC CUGAUGAG X CGAA AAUUUAG | CUAAAUU U GGCUAUG |
| 419 | HCV-7906 | 7906 | UGCCCCA CUGAUGAG X CGAA AGCCAAA | UUUGGCU A UGGGGCA |
| 420 | HCV-7955 | 7955 | CGGAGCG CUGAUGAG X CGAA AUGUGGU | ACCACAU C CGCUCCG |
| 421 | HCV-7960 | 7960 | CCACACG CUGAUGAG X CGAA AGCGGAU | AUCCGCU C CGUGUGG |
| 422 | HCV-8075 | 8075 | AUACGAU CUGAUGAG X CGAA AGGCGAG | CUCGCCU U AUCGUAU |
| 423 | HCV-8076 | 8076 | AAUACGA CUGAUGAG X CGAA AAGGCGA | UCGCCUU A UCGUAUU |
| 424 | HCV-8078 | 8078 | GGAAUAC CUGAUGAG X CGAA AUAAGGC | GCCUUAU C GUAUUCC |
| 425 | HCV-8170 | 8170 | GAAUCCG CUGAUGAG X CGAA ACGAGGA | UCCUCGU A CGGAUUC |
| 426 | HCV-8176 | 8176 | GUACUGG CUGAUGAG X CGAA AUCCGUA | UACGGAU U CCAGUAC |
| 427 | HCV-8182 | 8182 | AGGAGAG CUGAUGAG X CGAA ACUGGAA | UUCCAGU A CUCUCCU |
| 428 | ECV-8187 | 8187 | UGCCCAG CUGAUGAG X CGAA AGAGUAC | GUACUCU C CUGGGCA |
| 429 | HCV-8201 | 8201 | GGAACUC CUGAUGAG X CGAA ACCCGCU | AGCGGGU U GAGUUCC |
| 430 | HCV-8206 | 8206 | CACCAGG CUGAUGAG X CGAA ACUCAAC | GUUGAGU U CCUGGUG |
| 431 | HCV-8207 | 8207 | UCACCAG CUGAUGAG X CGAA AACUCAA | UUGAGUU C CUGGUGA |
| 432 | HCV-8227 | 8227 | UUUCUUU CUGAUGAG X CGAA AUUUCCA | UGGAAAU C AAAGAAA |
| 433 | HCV-8357 | 8357 | GCGACUU CUGAUGAG X CGAA AUGGCCU | AGGCCAU A AAGUCGC |
| 434 | HCV-8362 | 8362 | CGUGAGC CUGAUGAG X CGAA ACUUUAU | AUAAAGU C GCUCACG |
| 435 | HCV-8366 | 8366 | GCUCCGU CUGAUGAG X CGAA AGCGACU | AGUCGCU C ACGGAGC |
| 436 | HCV-8378 | 8378 | CGAUGUA CUGAUGAG X CGAA AGCCGCU | AGCGGCU C UACAUCG |
| 437 | HCV-8380 | 8380 | CCCGAUG CUGAUGAG X CGAA AGAGCCG | CGGCUCU A CAUCGGG |
| 438 | HCV-8384 | 8384 | GGCCCCC CUGAUGAG X CGAA AUGUAGA | UCUACAU C GGGGGCC |
| 439 | HCV-8424 | 8424 | CGGCGAU CUGAUGAG X CGAA ACCGCAG | CUGCGGU U AUCGCCG |
| 440 | HCV-8425 | 8425 | CCGGCGA CUGAUGAG X CGAA AACCGCA | UGCGGUU A UCGCCGG |
| 441 | HCV-8427 | 8427 | CACCGGC CUGAUGAG X CGAA AUAACCG | CGGUUAU C GCCGGUG |
| 442 | HCV-8460 | 8460 | CCGCAGC CUGAUGAG X CGAA AGUCGUC | GACGACU A GCUGCGG |
| 443 | HCV-8508 | 8508 | GCAGCUC CUGAUGAG X CGAA ACAGGCC | GGCCUGU C GAGCUGC |
| 444 | HCV-8522 | 8522 | AGUCCUG CUGAUGAG X CGAA AGCUUUG | CAAAGCU C CAGGACU |
| 445 | HCV-8540 | 8540 | CGUUCAC CUGAUGAG X CGAA AGCAUCG | CGAUGCU C GUGAACG |
| 446 | HCV-8558 | 8558 | UAACGAC CUGAUGAG X CGAA AGGUCGU | ACGACCU U GUCGUUA |
| 447 | HCV-8561 | 8561 | AGAUAAC CUGAUGAG X CGAA ACAAGGU | ACCUUGU C GUUAUCU |
| 448 | HCV-8564 | 8564 | CACAGAU CUGAUGAG X CGAA ACGACAA | UUGUCGU U AUCUGUG |
| 449 | HCV-8638 | 8638 | GGGGGCA CUGAUGAG X CGAA AGUACCU | AGGUACU C UGCCCCC |
| 450 | HCV-8671 | 8671 | CAAGUCG CUGAUGAG X CGAA AUUCUGG | CCAGAAU A CGACUUG |
| 451 | HCV-8698 | 8698 | GUUGGAG CUGAUGAG X CGAA AGCAUGA | UCAUGCU C CUCCAAC |
| 452 | HCV-8701 | 8701 | CACGUUG CUGAUGAG X CGAA AGGAGCA | UGCUCCU C CAACGUG |
| 453 | HCV-8728 | 8728 | UUUGCCG CUGAUGAG X CGAA AUGCGUC | GACGCAU C CGGCAAA |
| 454 | HCV-8774 | 8774 | CCCGUGC CUGAUGAG X CGAA AGGGGGG | CCCCCCU U GCACGGG |
| 455 | HCV-8842 | 8842 | GGGCGCA CUGAUGAG X CGAA ACAUGAU | AUCAUGU A UGCGCCC |
| 456 | HCV-8854 | 8854 | UGCCCAU CUGAUGAG X CGAA AGGUGGG | CCCACCU U AUGGGCA |
| 457 | HCV-8855 | 8855 | UUGCCCA CUGAUGAG X CGAA AAGGUGG | CCACCUU A UGGGCAA |
| 458 | HCV-8871 | 8871 | GUCAUCA CUGAUGAG X CGAA AAUCAUC | GAUGAUU U UGAUGAC |
| 459 | HCU-8880 | 8880 | AAGAAGU CUGAUGAG X CGAA AGUCAUC | GAUGACU C ACUUCUU |
| 460 | HCU-8931 | 8931 | AUCUGAC CUGAUGAG X CGAA AUCCAGG | CCUGGAU U GUCAGAU |
| 461 | HCV-8934 | 8934 | UAGAUCU CUGAUGAG X CGAA ACAAUCC | GGAUUGU C AGAUCUA |
| 462 | HCU-8939 | 8939 | CCCCGUA CUGAUGAG X CGAA AUCUGAC | GUCAGAU C UACGGGG |
| 463 | HCV-8941 | 8941 | GGCCCCG CUGAUGAG X CGAA AGAUCUG | CAGAUCU A CGGGGCC |
| 464 | HCV-9065 | 9065 | GUUUCCU CUGAUGAG X CGAA AGGCAUG | CAUGCCU C AGGAAAC |
| 465 | HCV-9074 | 9074 | GUACCCC CUGAUGAG X CGAA AGUUUCC | GGAAACU U GGGGUAC |
| 466 | HCV-9080 | 9080 | AGGGCGG CUGAUGAG X CGAA ACCCCAA | UUGGGGU A CCGCCCU |
| 467 | HCV-9088 | 9088 | GACUCGC CUGAUGAG X CGAA AGGGCGG | CCGCCCU U GCGAGUC |
| 468 | HCV-9095 | 9095 | GUCUCCA CUGAUGAG X CGAA ACUCGCA | UGCGAGU C UGGAGAC |
| 469 | HCV-9119 | 9119 | UAGCGCG CUGAUGAG X CGAA ACACUUC | GAAGUGU C CGCGCUA |
| 470 | HCV-9126 | 9126 | AGUAGCC CUGAUGAG X CGAA AGCGCGG | CCGCGCU A GGCUACU |
| 471 | HCV-9131 | 9131 | GGGACAG CUGAUGAG X CGAA AGCCUAG | CUAGGCU A CUGUCCC |
| 472 | HCV-9136 | 9136 | CCCUUGG CUGAUGAG X CGAA ACAGUAG | CUACUGU C CCAAGGG |
| 473 | HCV-9226 | 9226 | CAGCUGG CUGAUGAG X CGAA ACGCGGC | GCCGCGU C CCAGCUG |
| 474 | HCV-9238 | 9238 | GCUGGAC CUGAUGAG X CGAA AGUCCAG | CUGGACU U GUCCAGC |
| 475 | HCV-9241 | 9241 | CCAGCUG CUGAUGAG X CGAA ACAAGUC | GACUUGU C CAGCUGG |
| 476 | HCV-9250 | 9250 | AGCAACG CUGAUGAG X CGAA ACCAGCU | AGCUGGU U CGUUGCU |
| 477 | HCV-9251 | 9251 | CAGCAAC CUGAUGAG X CGAA AACCAGC | GCUGGUU C GUUGCUG |
| 478 | HCU-9254 | 9254 | AACCAGC CUGAUGAG X CGAA ACGAACC | GGUUCGU U GCUGGUU |
| 479 | HCV-9278 | 9278 | UGUGAUA CUGAUGAG X CGAA AUGUCUC | GAGACAU A UAUCACA |
| 480 | HCV-9280 | 9280 | GCUGUGA CUGAUGAG X CGAA AUAUGUC | GACAUAU A UCACAGC |
| 481 | HCV-9282 | 9282 | AGGCUGU CUGAUGAG X CGAA AUAUAUG | CAUAUAU C ACAGCCU |
| 482 | HCV-9292 | 9292 | GGCACGA CUGAUGAG X CGAA ACAGGCU | AGCCUGU C UCGUGCC |
| 483 | HCV-9326 | 9326 | GUAGGAG CUGAUGAG X CGAA AGGCACC | GGUGCCU A CUCCUAC |
| 484 | HCV-9329 | 9329 | AAAGUAG CUGAUGAG X CGAA AGUAGGC | GCCUACU C CUACUUU |
| 485 | HCV-9332 | 9332 | CGGAAAG CUGAUGAG X CGAA AGGAGUA | UACUCCU A CUUUCCG |
| 486 | HCV-9335 | 9335 | CUACGGA CUGAUGAG X CGAA AGUAGGA | UCCUACU U UCCGUAG |
| 487 | HCV-9336 | 9336 | CCUACGG CUGAUGAG X CGAA AAGUAGG | CCUACUU U CCGUAGG |
| 488 | HCV-9337 | 9337 | CCCUACG CUGAUGAG X CGAA AAAGUAG | CUACUUU C CGUAGGG |
| 489 | HCV-9341 | 9341 | CUACCCC CUGAUGAG X CGAA ACGGAAA | UUUCCGU A GGGGUAG |
| 490 | HCV-9347 | 9347 | AGAUGCC CUGAUGAG X CGAA ACCCCUA | UAGGGGU A GGCAUCU |
| 491 | HCV-9353 | 9353 | GCAGGUA CUGAUGAG X CGAA AUGCCUA | UAGGCAU C UACCUGC |
| 492 | HCV-9355 | 9355 | GAGCAGG CUGAUGAG X CGAA AGAUGCC | GGCAUCU A CCUGCUC |
| 493 | HCV-9362 | 9362 | GGUUGGG CUGAUGAG X CGAA AGCAGGU | ACCUGCU C CCCAACC |
| 494 | HCV-9385 | 9385 | GAGUGAU CUGAUGAG X CGAA AGCUCCC | GGGAGCU A AUCACUC |
| 495 | HCV-9388 | 9388 | CUGGAGU CUGAUGAG X CGAA AUUAGCU | AGCUAAU C ACUCCAG |
| 496 | HCV-9392 | 9392 | UGGCCUG CUGAUGAG X CGAA AGUGAUU | AAUCACU C CAGGCCA |
| 497 | HCV-9402 | 9402 | GAUGGCC CUGAUGAG X CGAA AUUGGCC | GGCCAAU A GGCCAUC |

Where “X” represents stem II region of a HH ribozyme (Hertel et al., 1992 Nucleic Acids Res. 20: 3252). The length of stem II may be ≧2 base-pairs.

[0169] TABLE VI
Additional HCV Hammerhead (HH) Ribozyme and
Target Sequence

| | | |
|---|---|---|
| Pos. | Ribozyme | Substrate |

| | | |
|---|---|---|
| 14 | CGCCCCC CUGAUGAG X CGAA AUCGGGG | CCCCGAU U GGGGGCG |
| 34 | AGUGAUC CUGAUGAG X CGAA AUGGUGG | CCACCAU A GAUCACU |
| 38 | GGGGAGU CUGAUGAG X CGAA AUCUAUG | CAUAGAU C ACUCCCC |
| 42 | CACAGGG CUGAUGAG X CGAA AGUGAUC | GAUCACU C CCCUGUG |
| 57 | AAGACAG CUGAUGAG X CGAA AGUUCCU | AGGAACU A CUGUCUU |
| 62 | GCGUGAA CUGAUGAG X CGAA ACAGUAG | CUACUGU C UUCACGC |
| 64 | CUGCGUG CUGAUGAG X CGAA AGACAGU | ACUGUCU U CACGCAG |
| 65 | UCUGCGU CUGAUGAG X CGAA AAGACAG | CUGUCUU C ACGCAGA |
| 79 | AUGGCUA CUGAUGAG X CGAA ACGCUUU | AAAGCGU C UAGCCAU |
| 81 | CCAUGGC CUGAUGAG X CGAA AGACGCU | AGCGUCU A GCCAUGG |
| 92 | UCAUACU CUGAUGAG X CGAA ACGCCAU | AUGGCGU U AGUAUGA |
| 93 | CUCAUAC CUGAUGAG X CGAA AACGCCA | UGGCGUU A GUAUGAG |
| 96 | ACACUCA CUGAUGAG X CGAA ACUAACG | CGUUAGU A UGAGUGU |
| 104 | GCUGCAC CUGAUGAG X CGAA ACACUCA | UGAGUGU C GUGCAGC |
| 142 | AGACCAC CUGAUGAG X CGAA AUGGCUC | GAGCCAU A GUGGUCU |
| 192 | AAGAAAG CUGAUGAG X CGAA ACCCGGU | ACCGGGU C CUUUCUU |
| 195 | UCCAAGA CUGAUGAG X CGAA AGGACCC | GGGUCCU U UCUUGGA |
| 196 | AUCCAAG CUGAUGAG X CGAA AAGGACC | GGUCCUU U CUUGGAU |
| 197 | GAUCCAA CUGAUGAG X CGAA AAAGGAC | GUCCUUU C UUGGAUC |
| 204 | GCGGGUU CUGAUGAG X CGAA AUCCAAG | CUUGGAU C AACCCGC |
| 227 | ACGCCCA CUGAUGAG X CGAA AUCUCCA | UGGAGAU U UGGGCGU |
| 228 | CACGCCC CUGAUGAG X CGAA AAUCUCC | GGAGAUU U GGGCGUG |
| 282 | GUACCAC CUGAUGAG X CGAA AGGCCUU | AAGGCCU U GUGGUAC |
| 354 | GGUUUAG CUGAUGAG X CGAA AUUCGUG | CACGAAU C CUAAACC |
| 357 | UGAGGUU CUGAUGAG X CGAA AGGAUUC | GAAUCCU A AACCUCA |
| 363 | UUUCUUU CUGAUGAG X CGAA AGGUUUA | UAAACCU C AAAGAAA |
| 381 | UAGGUGU CUGAUGAG X CGAA ACGUUUG | CAAACGU A ACACCUA |
| 388 | GCGGCGG CUGAUGAG X CGAA AGGUGUU | AACACCU A CCGCCGC |
| 431 | CACCAAC CUGAUGAG X CGAA AUCUGAC | GUCAGAU C GUUGGUG |
| 434 | CUCCACC CUGAUGAG X CGAA ACGAUCU | AGAUCGU U GGUGGAG |
| 443 | ACACGUA CUGAUGAG X CGAA ACUCCAC | GUGGAGU U UACGUGU |
| 444 | AACACGU CUGAUGAG X CGAA AACUCCA | UGGAGUU U ACGUGUU |
| 445 | CAACACG CUGAUGAG X CGAA AAACUCC | GGAGUUU A CGUGUUG |
| 451 | GCGCGGC CUGAUGAG X CGAA ACACGUA | UACGUGU U GCCGCGC |
| 516 | CUUCCAC CUGAUGAG X CGAA AGGUUGC | GCAACCU C GUGGAAG |
| 688 | AUUGCGC CUGAUGAG X CGAA ACCUCCG | CGGAGGU C GCGCAAU |
| 702 | AUGACCU CUGAUGAG X CGAA ACCCAGA | UCUGGGU A AGGUCAU |
| 719 | CGCACGU CUGAUGAG X CGAA AGGGUAU | AUACCCU C ACGUGCG |
| 740 | ACCCCAU CUGAUGAG X CGAA AGGUCGG | CCGACCU C AUGGGGU |
| 861 | AUAGAGA CUGAUGAG X CGAA AGAGCAA | UUGCUCU U UCUCUAU |
| 862 | GAUAGAG CUGAUGAG X CGAA AAGAGCA | UGCUCUU U CUCUAUC |
| 863 | AGAUAGA CUGAUGAG X CGAA AAAGAGC | GCUCUUU C UCUAUCU |
| 865 | GAAGAUA CUGAUGAG X CGAA AGAAAGA | UCUUUCU C UAUCUUC |
| 867 | AGGAAGA CUGAUGAG X CGAA AGAGAAA | UUUCUCU A UCUUCCU |
| 869 | AGAGGAA CUGAUGAG X CGAA AUAGAGA | UCUCUAU C UUCCUCU |
| 871 | CAAGAGG CUGAUGAG X CGAA AGAUAGA | UCUAUCU U CCUCUUG |
| 872 | CCAAGAG CUGAUGAG X CGAA AAGAUAG | CUAUCUU C CUCUUGG |
| 875 | GGGCCAA CUGAUGAG X CGAA AGGAAGA | UCUUCCU C UUGGCCC |
| 877 | CAGGGCC CUGAUGAG X CGAA AGAGGAA | UUCCUCU U GGCCCUG |
| 889 | CAAACAG CUGAUGAG X CGAA ACAGCAG | CUGCUGU C CUGUUUG |
| 894 | AUGGUCA CUGAUGAG X CGAA ACAGGAC | GUCCUGU U UGACCAU |
| 895 | GAUGGUC CUGAUGAG X CGAA AACAGGA | UCCUGUU U GACCAUC |
| 902 | AAGCUGG CUGAUGAG X CGAA AUGGUCA | UGACCAU C CCAGCUU |
| 909 | UAAGCGG CUGAUGAG X CGAA AGCUGGG | CCCAGCU U CCGCUUA |
| 910 | AUAAGCG CUGAUGAG X CGAA AAGCUGG | CCAGCUU C CGCUUAU |
| 915 | ACCUGAU CUGAUGAG X CGAA AGCGGAA | UUCCGCU U AUCAGGU |
| 916 | CACCUGA CUGAUGAG X CGAA AAGCGGA | UCCGCUU A UCAGGUG |
| 918 | CGCACCU CUGAUGAG X CGAA AUAAGCG | CGCUUAU C AGGUGCG |
| 934 | CAGCCCG CUGAUGAG X CGAA AUGCGUU | AACGCAU C CGGGCUG |
| 943 | GACAUGG CUGAUGAG X CGAA ACAGCCC | GGGCUGU A CCAUGUC |
| 950 | CAUUCGU CUGAUGAG X CGAA ACAUGGU | ACCAUGU C ACGAAUG |
| 964 | UGAGUUG CUGAUGAG X CGAA AGCAGUC | GACUGCU C CAACUCA |
| 970 | AAUGCUU CUGAUGAG X CGAA AGUUGGA | UCCAACU C AAGCAUU |
| 977 | CAUACAC CUGAUGAG X CGAA AUGCUUG | CAAGCAU U GUGUAUG |
| 1008 | CCGGGGG CUGAUGAG X CGAA AUGCAUG | CAUGCAU A CCCCCGG |
| 1067 | UGGGAGU CUGAUGAG X CGAA AGCGCUA | UAGCGCU C ACUCCCA |
| 1071 | AGCGUGG CUGAUGAG X CGAA AGUGAGC | GCUCACU C CCACGCU |
| 1079 | UGGCCGC CUGAUGAG X CGAA AGCGUGG | CCACGCU C GCGGCCA |
| 1100 | UAGUGGG CUGAUGAG X CGAA AUGCUGG | CCAGCAU C CCCACUA |
| 1107 | AUUGUCG CUGAUGAG X CGAA AGUGGGG | CCCCACU A CGACAAU |
| 1115 | GGCGUCG CUGAUGAG X CGAA AUUGUCG | CGACAAU A CGACGCC |
| 1152 | GAACAGA CUGAUGAG X CGAA AGCGGCC | GGCCGCU U UCUGUUC |
| 1181 | AUCCGCA CUGAUGAG X CGAA AGGUCCC | GGGACCU C UGCGGAU |
| 1199 | GGGAGAC CUGAUGAG X CGAA AGGAAAA | UUUUCCU C GUCUCCC |
| 1202 | ACUGGGA CUGAUGAG X CGAA ACGAGGA | UCCUCGU C UCCCAGU |
| 1204 | CAACUGG CUGAUGAG X CGAA AGACGAG | CUCGUCU C CCAGUUG |
| 1210 | GGUGAAC CUGAUGAG X CGAA ACUGGGA | UCCCAGU U GUUCACC |
| 1213 | GAAGGUG CUGAUGAG X CGAA ACAACUG | CAGUUGU U CACCUUC |
| 1214 | AGAAGGU CUGAUGAG X CGAA AACAACU | AGUUGUU C ACCUUCU |
| 1219 | AGGCGAG CUGAUGAG X CGAA AGGUGAA | UUCACCU U CUCGCCU |
| 1220 | GAGGCGA CUGAUGAG X CGAA AAGGUGA | UCACCUU C UCGCCUC |
| 1222 | GCGAGGC CUGAUGAG X CGAA AGAAGGU | ACCUUCU C GCCUCGC |
| 1227 | UACCGGC CUGAUGAG X CGAA AGGCGAG | CUCGCCU C GCCGGUA |
| 1234 | UGUCUCA CUGAUGAG X CGAA ACCGGCG | CGCCGGU A UGAGACA |
| 1244 | AGUCCUG CUGAUGAG X CGAA ACUGUCU | AGACAGU A CAGGACU |
| 1257 | AUUGAGC CUGAUGAG X CGAA AUUGCAG | CUGCAAU U GCUCAAU |
| 1261 | AUAGAUU CUGAUGAG X CGAA AGCAAUU | AAUUGCU C AAUCUAU |
| 1265 | CGGGAUA CUGAUGAG X CGAA AUUGAGC | GCUCAAU C UAUCCCG |
| 1267 | GCCGGGA CUGAUGAG X CGAA AGAUUGA | UCAAUCU A UCCCGGC |
| 1269 | UGGCCGG CUGAUGAG X CGAA AUAGAUU | AAUCUAU C CCGGCCA |
| 1299 | AUAUCCC CUGAUGAG X CGAA AGCCAUG | CAUGGCU U GGGAUAU |
| 1305 | AUCAUCA CUGAUGAG X CGAA AUCCCAA | UUGGGAU A UGAUGAU |
| 1321 | UGUAGGC CUGAUGAG X CGAA ACCAGUU | AACUGGU C GCCUACA |
| 1326 | GCUGUUG CUGAUGAG X CGAA AGGCGAC | GUCGCCU A CAACAGC |
| 1337 | ACACCAC CUGAUGAG X CGAA AGGGCUG | CAGCCCU A GUGGUGU |
| 1345 | UAACUGC CUGAUGAG X CGAA ACACCAC | GUGGUGU C GCAGUUA |
| 1351 | CCGGAGU CUGAUGAG X CGAA ACUGCGA | UCGCAGU U ACUCCGG |
| 1352 | UCCGGAG CUGAUGAG X CGAA AACUGCG | CGCAGUU A CUCCGGA |
| 1355 | GGAUCCG CUGAUGAG X CGAA AGUAACU | AGUUACU C CGGAUCC |
| 1361 | CUUGUGG CUGAUGAG X CGAA AUCCGGA | UCCGGAU C CCACAAG |
| 1449 | AAGACCU CUGAUGAG X CGAA AGCCCAG | CUGGGCU A AGGUCUU |
| 1454 | CAAUCAA CUGAUGAG X CGAA ACCUUAG | CUAAGGU C UUGAUUG |
| 1456 | CACAAUC CUGAUGAG X CGAA AGACCUU | AAGGUCU U GAUUGUG |
| 1460 | ACAUCAC CUGAUGAG X CGAA AUCAAGA | UCUUGAU U GUGAUGU |
| 1468 | AAAGAGU CUGAUGAG X CGAA ACAUCAC | GUGAUGU U ACUCUUU |
| 1469 | CAAAGAG CUGAUGAG X CGAA AACAUCA | UGAUGUU A CUCUUUG |
| 1472 | CGGCAAA CUGAUGAG X CGAA AGUAACA | UGUUACU C UUUGCCG |
| 1474 | GCCGGCA CUGAUGAG X CGAA AGAGUAA | UUACUCU U UGCCGGC |
| 1475 | CGCCGGC CUGAUGAG X CGAA AAGAGUA | UACUCUU U GCCGGCG |
| 1484 | CCCCGUC CUGAUGAG X CGAA ACGCCGG | CCGGCGU U GACGGGG |
| 1493 | UGUAAGU CUGAUGAG X CGAA ACCCCGU | ACGGGGU C ACUUACA |
| 1497 | GUCGUGU CUGAUGAG X CGAA AGUGACC | GGUCACU U ACACGAC |
| 1498 | UGUCGUG CUGAUGAG X CGAA AAGUGAC | GUCACUU A CACGACA |
| 1513 | AGCUUGC CUGAUGAG X CGAA ACCCCCC | GGGGGGU C GCAAGCU |
| 1521 | GUGUGGC CUGAUGAG X CGAA AGCUUGC | GCAAGCU C GCCACAC |
| 1538 | AGGACGU CUGAUGAG X CGAA ACGCUCU | AGAGCGU C ACGUCCU |
| 1543 | GAAGAAG CUGAUGAG X CGAA ACGUGAC | GUCACGU C CUUCUUC |
| 1546 | GGUGAAG CUGAUGAG X CGAA AGGACGU | ACGUCCU U CUUCACC |
| 1547 | GGGUGAA CUGAUGAG X CGAA AAGGACG | CGUCCUU C UUCACCC |
| 1549 | UUGGGUG CUGAUGAG X CGAA AGAAGGA | UCCUUCU U CACCCAA |
| 1550 | CUUGGGU CUGAUGAG X CGAA AAGAAGG | CCUUCUU C ACCCAAG |
| 1574 | UGAGCUG CUGAUGAG X CGAA AUUCUCU | AGAGAAU C CAGCUCA |
| 1580 | UGUUUAU CUGAUGAG X CGAA AGCUGGA | UCCAGCU C AUAAACA |
| 1583 | UGGUGUU CUGAUGAG X CGAA AUGAGCU | AGCUCAU A AACACCA |
| 1607 | UCCUGUU CUGAUGAG X CGAA AUGUGCC | GGCACAU C AACAGGA |
| 1636 | GUUGAGG CUGAUGAG X CGAA AUUCAUU | AAUGAAU C CCUCAAC |
| 1640 | CGGUGUU CUGAUGAG X CGAA AGGGAUU | AAUCCCU C AACACCG |
| 1651 | GGCAAAG CUGAUGAG X CGAA ACCCGGU | ACCGGGU U CUUUGCC |
| 1652 | CGGCAAA CUGAUGAG X CGAA AACCCGG | CCGGGUU C UUUGCCG |
| 1654 | UGCGGCA CUGAUGAG X CGAA AGAACCC | GGGUUCU U UGCCGCA |
| 1655 | GUGCGGC CUGAUGAG X CGAA AAGAACC | GGUUCUU U GCCGCAC |
| 1666 | UGCGUAG CUGAUGAG X CGAA ACAGUGC | GCACUGU U CUACGCA |
| 1667 | GUGCGUA CUGAUGAG X CGAA AACAGUG | CACUGUU C UACGCAC |
| 1669 | GUGUGCG CUGAUGAG X CGAA AGAACAG | CUGUUCU A CGCACAC |
| 1681 | CGAGUUG CUGAUGAG X CGAA ACUUGUG | CACAAGU U CAACUCG |
| 1682 | ACGAGUU CUGAUGAG X CGAA AACUUGU | ACAAGUU C AACUCGU |
| 1687 | UCCGGAC CUGAUGAG X CGAA AGUUGAA | UUCAACU C GUCCGGA |
| 1690 | GCAUCCG CUGAUGAG X CGAA ACGAGUU | AACUCGU C CGGAUGC |
| 1723 | GUCGAUG CUGAUGAG X CGAA AGCUGCA | UGCAGCU C CAUCGAC |
| 1764 | GGCUCGG CUGAUGAG X CGAA AUAGGUG | CACCUAU A CCGAGCC |
| 1773 | AGGUCCC CUGAUGAG X CGAA AGGCUCG | CGAGCCU A GGGACCU |
| 1785 | GGCCUCU CUGAUGAG X CGAA AUCCAGG | CCUGGAU C AGAGGCC |
| 1794 | CAGCAGU CUGAUGAG X CGAA AGGCCUC | GAGGCCU U ACUGCUG |
| 1861 | GAAACAG CUGAUGAG X CGAA ACACUGG | CCAGUGU A CUGUUUC |
| 1866 | GGGGUGA CUGAUGAG X CGAA ACAGUAC | GUACUGU U UCACCCC |
| 1867 | UGGGGUG CUGAUGAG X CGAA AACAGUA | UACUGUU U CACCCCA |
| 1868 | UUGGGGU CUGAUGAG X CGAA AAACAGU | ACUGUUU C ACCCCAA |
| 1955 | UGUUGAG CUGAUGAG X CGAA AGCAGCA | UGCUGCU U CUCAACA |
| 1956 | UUGUUGA CUGAUGAG X CGAA AAGCAGC | GCUGCUU C UCAACAA |
| 1958 | UGUUGUU CUGAUGAG X CGAA AGAAGCA | UGCUUCU C AACAACA |
| 2020 | CUUGGUG CUGAUGAG X CGAA ACCCAGU | ACUGGGU U CACCAAG |
| 2021 | UCUUGGU CUGAUGAG X CGAA AACCCAG | CUGGGUU C ACCAAGA |
| 2094 | CGAAAGC CUGAUGAG X CGAA AUCCGUG | CACGGAU U GCUUUCG |
| 2098 | CUUCCGA CUGAUGAG X CGAA AGCAAUC | GAUUGCU U UCGGAAG |
| 2099 | GCUUCCG CUGAUGAG X CGAA AAGCAAU | AUUGCUU U CGGAAGC |
| 2100 | UGCUUCC CUGAUGAG X CGAA AAAGCAA | UUGCUUU C GGAAGCA |
| 2157 | AUACACC CUGAUGAG X CGAA AGGUGUU | AACACCU A GGUGUAU |
| 2163 | UCAACUA CUGAUGAG X CGAA ACACCUA | UAGGUGU A UAGUUGA |
| 2165 | AGUCAAC CUGAUGAG X CGAA AUACACC | GGUGUAU A GUUGACU |
| 2168 | GGUAGUC CUGAUGAG X CGAA ACUAUAC | GUAUAGU U GACUACC |
| 2173 | GUAUGGG CUGAUGAG X CGAA AGUCAAC | GUUGACU A CCCAUAC |
| 2179 | GAGCCUG CUGAUGAG X CGAA AUGGGUA | UACCCAU A CAGGCUC |
| 2186 | AGUGCCA CUGAUGAG X CGAA AGCCUGU | ACAGGCU C UGGCACU |
| 2194 | GCAGGGG CUGAUGAG X CGAA AGUGCCA | UGGCACU A CCCCUGC |
| 2207 | UAAAGUU CUGAUGAG X CGAA ACAGUGC | GCACUGU C AACUUUA |
| 2212 | GAUGGUA CUGAUGAG X CGAA AGUUGAC | GUCAACU U UACCAUC |
| 2213 | AGAUGGU CUGAUGAG X CGAA AAGUUGA | UCAACUU U ACCAUCU |
| 2214 | AAGAUGG CUGAUGAG X CGAA AAAGUUG | CAACUUU A CCAUCUU |
| 2222 | UAACCUU CUGAUGAG X CGAA AAGAUGG | CCAUCUU U AAGGUUA |
| 2223 | CUAACCU CUGAUGAG X CGAA AAAGAUG | CAUCUUU A AGGUUAG |
| 2228 | ACAUCCU CUGAUGAG X CGAA ACCUUAA | UUAAGGU U AGGAUGU |
| 2229 | UACAUCC CUGAUGAG X CGAA AACCUUA | UAAGGUU A GGAUGUA |
| 2236 | CCCCACA CUGAUGAG X CGAA ACAUCCU | AGGAUGU A UGUGGGG |
| 2283 | UCUCCUC CUGAUGAG X CGAA AGUCCAG | CUGGACU C GAGGAGA |
| 2366 | AACAGGG CUGAUGAG X CGAA AGUGUCU | AGACACU U CCCUGUU |
| 2367 | GAACAGG CUGAUGAG X CGAA AAGUGUC | GACACUU C CCUGUUC |
| 2373 | GUGAAGG CUGAUGAG X CGAA ACAGGGA | UCCCUGU U CCUUCAC |
| 2374 | GGUGAAG CUGAUGAG X CGAA AACAGGG | CCCUGUU C CUUCACC |
| 2377 | GGUGGUG CUGAUGAG X CGAA AGGAACA | UGUUCCU U CACCACC |
| 2378 | GGGUGGU CUGAUGAG X CGAA AAGGAAC | GUUCCUU C ACCACCC |
| 2387 | GAGCCGG CUGAUGAG X CGAA AGGGUGG | CCACCCU A CCGGCUC |
| 2394 | GUGGACA CUGAUGAG X CGAA AGCCGGU | ACCGGCU C UGUCCAC |
| 2398 | ACCAGUG CUGAUGAG X CGAA ACAGAGC | GCUCUGU C CACUGGU |
| 2406 | UGGAUCA CUGAUGAG X CGAA ACCAGUG | CACUGGU U UGAUCCA |
| 2407 | GUGGAUC CUGAUGAG X CGAA AACCAGU | ACUGGUU U GAUCCAC |
| 2411 | GGAGGUG CUGAUGAG X CGAA AUCAAAC | GUUUGAU C CACCUCC |
| 2443 | GUACAGG CUGAUGAG X CGAA ACUGCAC | GUGCAGU A CCUGUAC |
| 2449 | UAUACCG CUGAUGAG X CGAA ACAGGUA | UACCUGU A CGGUAUA |
| 2454 | GACCCUA CUGAUGAG X CGAA ACCGUAC | GUACGGU A UAGGGUC |
| 2456 | CUGACCC CUGAUGAG X CGAA AUACCGU | ACGGUAU A GGGUCAG |
| 2461 | AACCGCU CUGAUGAG X CGAA ACCCUAU | AUAGGGU C AGCGGUU |
| 2468 | AGGAGAC CUGAUGAG X CGAA ACCGCUG | CAGCGGU U GUCUCCU |
| 2471 | CAAAGGA CUGAUGAG X CGAA ACAACCG | CGGUUGU C UCCUUUG |
| 2473 | CACAAAG CUGAUGAG X CGAA AGACAAC | GUUGUCU C CUUUGUG |
| 2476 | GAUCACA CUGAUGAG X CGAA AGGAGAC | GUCUCCU U UGUGAUC |
| 2477 | UGAUCAC CUGAUGAG X CGAA AAGGAGA | UCUCCUU U GUGAUCA |
| 2483 | CCCAUUU CUGAUGAG X CGAA AUCACAA | UUGUGAU C AAAUGGG |
| 2494 | CACGAUA CUGAUGAG X CGAA ACUCCCA | UGGGAGU A UAUCGUG |
| 2496 | AACACGA CUGAUGAG X CGAA AUACUCC | GGAGUAW A UCGUGUU |
| 2498 | GCAACAC CUGAUGAG X CGAA AUAUACU | AGUAUAU C GUGUUGC |
| 2503 | GAAAAGC CUGAUGAG X CGAA ACACGAU | AUCGUGU U GCUUUUC |
| 2507 | GAAGGAA CUGAUGAG X CGAA AGCAACA | UGUUGCU U UUCCUUC |
| 2508 | AGAAGGA CUGAUGAG X CGAA AAGCAAC | GUUGCUU U UCCUUCU |
| 2509 | GAGAAGG CUGAUGAG X CGAA AAAGCAA | UUGCUUU U CCUUCUC |
| 2510 | GGAGAAG CUGAUGAG X CGAA AAAAGCA | UGCUUUU C CUUCUCC |
| 2513 | CCAGGAG CUGAUGAG X CGAA AGGAAAA | UUUUCCU U CUCCUGG |
| 2514 | GCCAGGA CUGAUGAG X CGAA AAGGAAA | UUUCCUU C UCCUGGC |
| 2516 | CCGCCAG CUGAUGAG X CGAA AGAAGGA | UCCUUCU C CUGGCGG |
| 2545 | CAUCCAC CUGAUGAG X CGAA AGCAGGC | GCCUGCU U GUGGAUG |
| 2564 | CCUGGGC CUGAUGAG X CGAA AUCAGCA | UGCUGAU A GCCCAGG |
| 2614 | GGCCAGG CUGAUGAG X CGAA ACGCCGC | GCGGCGU C CCUGGCC |
| 2636 | AGGAGAG CUGAUGAG X CGAA AUGCCAU | AUGGCAU U CUCUCCU |
| 2637 | AAGGAGA CUGAUGAG X CGAA AAUGCCA | UGGCAUU C UCUCCUU |
| 2639 | GGAAGGA CUGAUGAG X CGAA AGAAUGC | GCAUUCU C UCCUUCC |
| 2641 | AAGGAAG CUGAUGAG X CGAA AGAGAAU | AUUCUCU C CUUCCUU |
| 2644 | CACAAGG CUGAUGAG X CGAA AGGAGAG | CUCUCCU U CCUUGUG |
| 2645 | ACACAAG CUGAUGAG X CGAA AAGGAGA | UCUCCUU C CUUGUGU |
| 2648 | AAAACAC CUGAUGAG X CGAA AGGAAGG | CCUUCCU U GUGUUUU |
| 2653 | ACAGAAA CUGAUGAG X CGAA ACACAAG | CUUGUGU U UUUCUGU |
| 2654 | CACAGAA CUGAUGAG X CGAA AACACAA | UUGUGUU U UUCUGUG |
| 2655 | GCACAGA CUGAUGAG X CGAA AAACACA | UGUGUUU U UCUGUGC |
| 2656 | GGCACAG CUGAUGAG X CGAA AAAACAC | GUGUUUU U CUGUGCC |
| 2657 | CGGCACA CUGAUGAG X CGAA AAAAACA | UGUUUUU C UGUGCCG |
| 2732 | GGAGCAG CUGAUGAG X CGAA AGCAGCG | CGCUGCU C CUGCUCC |
| 2749 | UGGUGGU CUGAUGAG X CGAA ACGCCAG | CUGGCGU U ACCACCA |
| 2750 | GUGGUGG CUGAUGAG X CGAA AACGCCA | UGGCGUU A CCACCAC |
| 2791 | UCCACAC CUGAUGAG X CGAA AUGCAGC | GCUGCAU C GUGUGGA |
| 2807 | CUACAAA CUGAUGAG X CGAA ACCACCC | GGGUGGU U UUUGUAG |
| 2808 | CCUACAA CUGAUGAG X CGAA AACCACC | GGUGGUU U UUGUAGG |
| 2809 | ACCUACA CUGAUGAG X CGAA AAACCAC | GUGGUUU U UGUAGGU |
| 2810 | GACCUAC CUGAUGAG X CGAA AAAACCA | UGGUUUU U GUAGGUC |
| 2813 | UUAGACC CUGAUGAG X CGAA ACAAAAA | UUUUUGU A GGUCUAA |
| 2817 | AGUAUUA CUGAUGAG X CGAA ACCUACA | UGUAGGU C UAAUACU |
| 2819 | AGAGUAU CUGAUGAG X CGAA AGACCUA | UAGGUCU A AUACUCU |
| 2822 | UCAAGAG CUGAUGAG X CGAA AUUAGAC | GUCUAAU A CUCUUGA |
| 2825 | AGGUCAA CUGAUGAG X CGAA AGUAUUA | UAAUACU C UUGACCU |
| 2827 | CAAGGUC CUGAUGAG X CGAA AGAGUAU | AUACUCU U GACCUUG |
| 2833 | UGGUGAC CUGAUGAG X CGAA AGGUCAA | UUGACCU U GUCACCA |
| 2836 | GUGUGGU CUGAUGAG X CGAA ACAAGGU | ACCUUGU C ACCACAC |
| 2845 | CACUUUG CUGAUGAG X CGAA AGUGUGG | CCACACU A CAAAGUG |
| 2854 | GGCGAGG CUGAUGAG X CGAA ACACUUU | AAAGUGU U CCUCGCC |
| 2855 | UGGCGAG CUGAUGAG X CGAA AACACUU | AAGUGUU C CUCGCCA |
| 2858 | GCCUGGC CUGAUGAG X CGAA AGGAACA | UGUUCCU C GCCAGGC |
| 2867 | ACCAUAU CUGAUGAG X CGAA AGCCUGG | CCAGGCU C AUAUGGU |
| 2870 | ACCACCA CUGAUGAG X CGAA AUGAGCC | GGCUCAU A UGGUGGU |
| 2889 | CUGGUGA CUGAUGAG X CGAA AAAGUAU | AUACUUU A UCACCAG |
| 2891 | CCCUGGU CUGAUGAG X CGAA AUAAAGU | ACUUUAU C ACCAGGG |
| 2993 | CAAAGAU CUGAUGAG X CGAA AGCUCUG | CAGAGCU A AUCUUUG |
| 2996 | UGUCAAA CUGAUGAG X CGAA AUUAGCU | AGCUAAU C UUUGACA |
| 2998 | AAUGUCA CUGAUGAG X CGAA AGAUUAG | CUAAUCU U UGACAUU |
| 2999 | UAAUGUC CUGAUGAG X CGAA AAGAUUA | UAAUCUU U GACAUUA |
| 3005 | GUUUGGU CUGAUGAG X CGAA AUGUCAA | UUGACAU U ACCAAAC |
| 3006 | AGUUUGG CUGAUGAG X CGAA AAUGUCA | UGACAUU A CCAAACU |
| 3014 | CGAGCAG CUGAUGAG X CGAA AGUUUGG | CCAAACU C CUGCUCG |
| 3020 | GAAUGGC CUGAUGAG X CGAA AGCAGGA | UCCUGCU C GCCAUUC |
| 3026 | GACCGAG CUGAUGAG X CGAA AUGGCGA | UCGCCAU U CUCGGUC |
| 3027 | GGACCGA CUGAUGAG X CGAA AAUGGCG | CGCCAUU C UCGGUCC |
| 3029 | GCGGACC CUGAUGAG X CGAA AGAAUGG | CCAUUCU C GGUCCGC |
| 3033 | AUGAGCG CUGAUGAG X CGAA ACCGAGA | UCUCGGU C CGCUCAU |
| 3038 | GCACCAU CUGAUGAG X CGAA AGCGGAC | GUCCGCU C AUGGUGC |
| 3047 | CAGCCUG CUGAUGAG X CGAA AGCACCA | UGGUGCU C CAGGCUG |
| 3073 | UACAAAG CUGAUGAG X CGAA ACGGCAU | AUGCCGU A CUUUGUA |
| 3076 | GCGUACA CUGAUGAG X CGAA AGUACGG | CCGUACU U UGUACGC |
| 3077 | CGCGUAC CUGAUGAG X CGAA AAGUACG | CGUACUU U GUACGCG |
| 3080 | GAGCGCG CUGAUGAG X CGAA ACAAAGU | ACUUUGU A CGCGCUC |
| 3087 | AGCCCCU CUGAUGAG X CGAA AGCGCGU | ACGCGCU C AGGGGCU |
| 3095 | CACGAAU CUGAUGAG X CGAA AGCCCCU | AGGGGCU U AUUCGUG |
| 3096 | GCACGAA CUGAUGAG X CGAA AAGCCCC | GGGGCUU A UUCGUGC |
| 3098 | AUGCACG CUGAUGAG X CGAA AUAAGCC | GGCUUAU U CGUGCAU |
| 3099 | CAUGCAC CUGAUGAG X CGAA AAUAAGC | GCUUAUU C GUGCAUG |
| 3112 | CCGCACC CUGAUGAG X CGAA ACAUGCA | UGCAUGU U GGUGCGG |
| 3125 | CUCCGGC CUGAUGAG X CGAA ACUUUCC | GGAAAGU A GCCGGAG |
| 3180 | ACGUACG CUGAUGAG X CGAA ACCUGUC | GACAGGU A CGUACGU |
| 3184 | AUAGACG CUGAUGAG X CGAA ACGUACC | GGUACGU A CGUCUAU |
| 3188 | GGUCAUA CUGAUGAG X CGAA ACGUACG | CGUACGU C UAUGACC |
| 3190 | AUGGUCA CUGAUGAG X CGAA AGACGUA | UACGUCU A UGACCAU |
| 3198 | GGGGUAA CUGAUGAG X CGAA AUGGUCA | UGACCAU C UUACCCC |
| 3200 | GCGGGGU CUGAUGAG X CGAA AGAUGGU | ACCAUCU U ACCCCGC |
| 3201 | AGCGGGG CUGAUGAG X CGAA AAGAUGG | CCAUCUU A CCCCGCU |
| 3254 | CGGGCUC CUGAUGAG X CGAA ACUGCCA | UGGCAGU A GAGCCCG |
| 3269 | UGUCAGA CUGAUGAG X CGAA AAGACGA | UCGUCUU C UCUGACA |
| 3271 | CAUGUCA CUGAUGAG X CGAA AGAAGAC | GUCUUCU C UGACAUG |
| 3374 | GUCCCAG CUGAUGAG X CGAA AGUAUCU | AGAUACU U CUGGGAC |
| 3375 | GGUCCCA CUGAUGAG X CGAA AAGUAUC | GAUACUU C UGGGACC |
| 3390 | UCAAUGC CUGAUGAG X CGAA AUCGGCC | GGCCGAU A GCAUUGA |
| 3395 | GCCCUUC CUGAUGAG X CGAA AUGCUAU | AUAGCAU U GAAGGGC |
| 3436 | UUGGGCG CUGAUGAG X CGAA AGGCCGU | ACGGCCU A CGCCCAA |
| 3458 | AACCAAG CUGAUGAG X CGAA AGGCCCC | GGGGCCU A CUUGGUU |
| 3461 | UGCAACC CUGAUGAG X CGAA AGUAGGC | GCCUACU U GGUUGCA |
| 3465 | ACAAUGC CUGAUGAG X CGAA ACCAAGU | ACUUGGU U GCAUUGU |
| 3470 | UAGUAAC CUGAUGAG X CGAA AUGCAAC | GUUGCAU U GUUACUA |
| 3473 | GGCUAGU CUGAUGAG X CGAA ACAAUGC | GCAUUGU U ACUAGCC |
| 3474 | AGGCUAG CUGAUGAG X CGAA AACAAUG | CAUUGUU A CUAGCCU |
| 3477 | GUGAGGC CUGAUGAG X CGAA AGUAACA | UGUUACU A GCCUCAC |
| 3506 | CCCCUUC CUGAUGAG X CGAA ACCUGGU | ACCAGGU C GAAGGGG |
| 3544 | CAGGAAA CUGAUGAG X CGAA AUUGUGU | ACACAAU C UUUCCUG |
| 3546 | GCCAGGA CUGAUGAG X CGAA AGAUUGU | ACAAUCU U UCCUGGC |
| 3547 | CGCCAGG CUGAUGAG X CGAA AAGAUUG | CAAUCUU U CCUGGCG |
| 3548 | UCGCCAG CUGAUGAG X CGAA AAAGAUU | AAUCUUU C CUGGCGA |
| 3563 | CACCAUU CUGAUGAG X CGAA ACGCAGG | CCUGCGU U AAUGGUG |
| 3564 | ACACCAU CUGAUGAG X CGAA AACGCAG | CUGCGUU A AUGGUGU |
| 3584 | CGUGGAA CUGAUGAG X CGAA ACGGUCC | GGACCGU C UUCCACG |
| 3586 | GCCGUGG CUGAUGAG X CGAA AGACGGU | ACCGUCU U CCACGGC |
| 3587 | CGCCGUG CUGAUGAG X CGAA AAGACGG | CCGUCUU C CACGGCG |
| 3632 | UUUGGGU CUGAUGAG X CGAA AUUGGGC | GCCCAAU C ACCCAAA |
| 3643 | AUUAGUG CUGAUGAG X CGAA ACAUUUG | CAAAUGU A CACUAAU |
| 3648 | UCUACAU CUGAUGAG X CGAA AGUGUAC | GUACACU A AUGUAGA |
| 3653 | CUUGGUC CUGAUGAG X CGAA ACAUUAG | CUAAUGU A GACCAAG |
| 3665 | AGCCGAC CUGAUGAG X CGAA AGGUCUU | AAGACCU C GUCGGCU |
| 3668 | GCCAGCC CUGAUGAG X CGAA ACGAGGU | ACCUCGU C GGCUGGC |
| 3720 | UCCGAGC CUGAUGAG X CGAA ACCGCAG | CUGCGGU A GCUCGGA |
| 3758 | CCGGAAU CUGAUGAG X CGAA ACGUCAG | CUGACGU C AUUCCGG |
| 3815 | AAUAGGA CUGAUGAG X CGAA ACGGGUC | GACCCGU C UCCUAUU |
| 3817 | CAAAUAG CUGAUGAG X CGAA AGACGGG | CCCGUCU C CUAUUUG |
| 3820 | CUUCAAA CUGAUGAG X CGAA AGGAGAC | GUCUCCU A UUUGAAG |
| 3822 | CCCUUCA CUGAUGAG X CGAA AUAGGAG | CUCCUAU U UGAAGGG |
| 3823 | GCCCUUC CUGAUGAG X CGAA AAUAGGA | UCCUAUU U GAAGGGC |
| 3832 | ACCCGAA CUGAUGAG X CGAA AGCCCUU | AAGGGCU C UUCGGGU |
| 3834 | CCACCCG CUGAUGAG X CGAA AGAGCCC | GGGCUCU U CGGGUGG |
| 3925 | GGGUAUG CUGAUGAG X CGAA AGUCCAC | GUGGACU U CAUACCC |
| 3926 | CGGGUAU CUGAUGAG X CGAA AAGUCCA | UGGACUU C AUACCCG |
| 3929 | CAACGGG CUGAUGAG X CGAA AUGAAGU | ACUUCAU A CCCGUUG |
| 3935 | UAGACUC CUGAUGAG X CGAA ACGGGUA | UACCCGU U GAGUCUA |
| 3940 | UUCCAUA CUGAUGAG X CGAA ACUCAAC | GUUGAGU C UAUGGAA |
| 3942 | GUUUCCA CUGAUGAG X CGAA AGACUCA | UGAGUCU A UGGAAAC |
| 3951 | CGCAUAG CUGAUGAG X CGAA AGUUUCC | GGAAACU A CUAUGCG |
| 3954 | GACCGCA CUGAUGAG X CGAA AGUAGUU | AACUACU A UGCGGUC |
| 3961 | GACCGGG CUGAUGAG X CGAA ACCGCAU | AUGCGGU C CCCGGUC |
| 3968 | CCGUGAA CUGAUGAG X CGAA ACCGGGG | CCCCGGU C UUCACGG |
| 3970 | GUCCGUG CUGAUGAG X CGAA AGACCGG | CCGGUCU U CACGGAC |
| 3971 | UGUCCGU CUGAUGAG X CGAA AAGACCG | CGGUCUU C ACGGACA |
| 3982 | GGGAGAU CUGAUGAG X CGAA AGUUGUC | GACAACU C AUCUCCC |
| 3985 | CGGGGGA CUGAUGAG X CGAA AUGAGUU | AACUCAU C UCCCCCG |
| 3987 | GCCGGGG CUGAUGAG X CGAA AGAUGAG | CUCAUCU C CCCCGGC |
| 3998 | UCUGCGG CUGAUGAG X CGAA ACGGCCG | CGGCCGU A CCGCAGA |
| 4009 | CACUUGG CUGAUGAG X CGAA AUGUCUG | CAGACAU U CCAAGUG |
| 4010 | CCACUUG CUGAUGAG X CGAA AAUGUCU | AGACAUU C CAAGUGG |
| 4023 | GCGUGUA CUGAUGAG X CGAA AUGGGCC | GGCCCAU C UACACGC |
| 4025 | GAGCGUG CUGAUGAG X CGAA AGAUGGG | CCCAUCU A CACGCUC |
| 4032 | CCAGUGG CUGAUGAG X CGAA AGCGUGU | ACACGCU C CCACUGG |
| 4094 | GGACGAG CUGAUGAG X CGAA ACCUUGU | ACAAGGU A CUCGUCC |
| 4097 | UCAGGAC CUGAUGAG X CGAA AGUACCU | AGGUACU C GUCCUGA |
| 4100 | GGUUCAG CUGAUGAG X CGAA ACGAGUA | UACUCGU C CUGAACC |
| 4111 | GGCAACA CUGAUGAG X CGAA AUGGGUU | AACCCAU C UGUUGCC |
| 4126 | AAAACCC CUGAUGAG X CGAA AGGUGGC | GCCACCU U GGGUUUU |
| 4131 | GCCCCAA CUGAUGAG X CGAA ACCCAAG | CUUGGGU U UUGGGGC |
| 4132 | CGCCCCA CUGAUGAG X CGAA AACCCAA | UUGGGUU U UGGGGCG |
| 4133 | ACGCCCC CUGAUGAG X CGAA AAACCCA | UGGGUUU U GGGGCGU |
| 4141 | AGACAUA CUGAUGAG X CGAA ACGCCCC | GGGGCGU A UAUGUCU |
| 4143 | UUAGACA CUGAUGAG X CGAA AUACGCC | GGCGUAU A UGUCUAA |
| 4147 | UGCCUUA CUGAUGAG X CGAA ACAUAUA | UAUAUGU C UAAGGCA |
| 4149 | UGUGCCU CUGAUGAG X CGAA AGACAUA | UAUGUCU A AGGGACA |
| 4161 | GGGUCGG CUGAUGAG X CGAA ACCAUGU | ACAUGGU A CCGACCC |
| 4196 | CCGUGGU CUGAUGAG X CGAA AUGGUCC | GGACCAU U ACCACGG |
| 4197 | CCCGUGG CUGAUGAG X CGAA AAUGGUC | GACCAUU A CCACGGG |
| 4214 | AGUACGU CUGAUGAG X CGAA AUGGGGG | CCCCCAU C ACGUACU |
| 4219 | GGUGGAG CUGAUGAG X CGAA ACGUGAU | AUCACGU A CUCCACC |
| 4222 | AUAGGUG CUGAUGAG X CGAA AGUACGU | ACGUACU C CACCUAU |
| 4257 | CCCCCAG CUGAUGAG X CGAA ACAUCCA | UGGAUGU U CUGGGGG |
| 4258 | GCCCCCA CUGAUGAG X CGAA AACAUCC | GGAUGUU C UGGGGGC |
| 4270 | GAUAUCA CUGAUGAG X CGAA AGGCGCC | GGCGCCU A UGAUAUC |
| 4275 | AUUAUGA CUGAUGAG X CGAA AUCAUAG | CUAUGAU A UCAUAAU |
| 4277 | AUAUUAU CUGAUGAG X CGAA AUAUCAU | AUGAUAU C AUAAUAU |
| 4300 | GUCAGUU CUGAUGAG X CGAA AGUGGCA | UGCCACU C AACUGAC |
| 4309 | GGUAGUC CUGAUGAG X CGAA AGUCAGU | ACUGACU C GACUACC |
| 4314 | AGGAUGG CUGAUGAG X CGAA AGUCGAG | CUCGACU A CCAUCCU |
| 4319 | UGCCCAG CUGAUGAG X CGAA AUGGUAG | CUACCAU C CUGGGCA |
| 4328 | CUGUGCC CUGAUGAG X CGAA AUGCCCA | UGGGCAU C GGCACAG |
| 4389 | GGAGGCG CUGAUGAG X CGAA AGCGGUG | CACCGCU A CGCCUCC |
| 4395 | GAUCCCG CUGAUGAG X CGAA AGGCGUA | UACGCCU C CGGGAUC |
| 4402 | GGUAACC CUGAUGAG X CGAA AUCCCGG | CCGGGAU C GGUUACC |
| 4406 | GCACGGU CUGAUGAG X CGAA ACCGAUC | GAUCGGU U ACCGUGC |
| 4407 | GGCACGG CUGAUGAG X CGAA AACCGAU | AUCGGUU A CCGUGCC |
| 4427 | CCUCCUC CUGAUGAG X CGAA AUAUUUG | CAAAUAU U GAGGAGG |
| 4440 | UUGGACA CUGAUGAG X CGAA AGCCACC | GGUGGCU C UGUCCAA |
| 4465 | GCCAUAG CUGAUGAG X CGAA AGGGGAU | AUCCCCU U CUAUGGC |
| 4466 | UGCCAUA CUGAUGAG X CGAA AAGGGGA | UCCCCUU C UAUGGCA |
| 4468 | CUUGCCA CUGAUGAG X CGAA AGAAGGG | CCCUUCU A UGGCAAG |
| 4512 | AAAAUGA CUGAUGAG X CGAA AUGCCUU | AAGGCAU C UCAUUUU |
| 4514 | AGAAAAU CUGAUGAG X CGAA AGAUGCC | GGCAUCU C AUUUUCU |
| 4517 | GGCAGAA CUGAUGAG X CGAA AUGAGAU | AUCUCAU U UUCUGCC |
| 4518 | UGGCAGA CUGAUGAG X CGAA AAUGAGA | UCUCAUU U UCUGCCA |
| 4519 | GUGGCAG CUGAUGAG X CGAA AAAUGAG | CUCAUUU U CUGCCAC |
| 4520 | AGUGGCA CUGAUGAG X CGAA AAAAUGA | UCAUUUU C UGCCACU |
| 4550 | UUGCGGC CUGAUGAG X CGAA AGCUCAU | AUGAGCU C GCCGCAA |
| 4564 | GAGGCCU CUGAUGAG X CGAA ACAGCUU | AAGCUGU C AGGCCUC |
| 4571 | UGAUUCC CUGAUGAG X CGAA AGGCCUG | CAGGCCU C GGAAUCA |
| 4602 | ACGUCAA CUGAUGAG X CGAA ACCCCGG | CCGGGGU C UUGACGU |
| 4604 | ACACGUC CUGAUGAG X CGAA AGACCCC | GGGGUCU U GACGUGU |
| 4612 | UAUGACG CUGAUGAG X CGAA ACACGUC | GACGUGU C CGUCAUA |
| 4637 | CGAUAAC CUGAUGAG X CGAA ACAUCUC | GAGAUGU C GUUAUCG |
| 4640 | CCACGAU CUGAUGAG X CGAA ACGACAU | AUGUCGU U AUCGUGG |
| 4641 | GCCACGA CUGAUGAG X CGAA AACGACA | UGUCGUU A UCGUGGC |
| 4643 | UUGCCAC CUGAUGAG X CGAA AUAACGA | UCGUUAU C GUGGCAA |
| 4659 | GUCAUUA CUGAUGAG X CGAA AGCGUCU | AGACGCU C UAAUGAC |
| 4661 | CCGUCAU CUGAUGAG X CGAA AGAGCGU | ACGCUCU A AUGACGG |
| 4684 | CGAGUCA CUGAUGAG X CGAA AGUCACC | GGUGACU U UGACUCG |
| 4685 | CCGAGUC CUGAUGAG X CGAA AAGUCAC | GUGACUU U GACUCGG |
| 4690 | GAUCACC CUGAUGAG X CGAA AGUCAAA | UUUGACU C GGUGAUC |
| 4715 | UCUGGGU CUGAUGAG X CGAA ACACAUG | CAUGUGU C ACCCAGA |
| 4727 | UGAAAUC CUGAUGAG X CGAA ACUGUCU | AGACAGU C GAUUUCA |
| 4731 | AAGCUGA CUGAUGAG X CGAA AUCGACU | AGUCGAU U UCAGCUU |
| 4732 | CAAGCUG CUGAUGAG X CGAA AAUCGAC | GUCGAUU U CAGCUUG |
| 4733 | CCAAGCU CUGAUGAG X CGAA AAAUCGA | UCGAUUU C AGCUUGG |
| 4738 | GGGAUCC CUGAUGAG X CGAA AGCUGAA | UUCAGCU U GGAUCCC |
| 4743 | AAGGUGG CUGAUGAG X CGAA AUCCAAG | CUUGGAU C CCACCUU |
| 4750 | AAUGGUA CUGAUGAG X CGAA AGGUGGG | CCCACCU U UACCAUU |
| 4751 | CAAUGGU CUGAUGAG X CGAA AAGGUGG | CCACCUU U ACCAUUG |
| 4752 | UCAAUGG CUGAUGAG X CGAA AAAGGUG | CACCUUU A CCAUUGA |
| 4757 | UCGUCUC CUGAUGAG X CGAA AUGGUAA | UUACCAU U GAGACGA |
| 4824 | CCUCCCC CUGAUGAG X CGAA ACCCCUG | CAGGGGU A GGGGAGG |
| 4835 | ACCUGUA CUGAUGAG X CGAA AUGCCUC | GAGGCAU C UACAGGU |
| 4837 | AAACCUG CUGAUGAG X CGAA AGAUGCC | GGCAUCU A CAGGUUU |
| 4843 | AGUCACA CUGAUGAG X CGAA ACCUGUA | UACAGGU U UGUGACU |
| 4844 | GAGUCAC CUGAUGAG X CGAA AACCUGU | ACAGGUU U GUGACUC |
| 4851 | UCUCCCG CUGAUGAG X CGAA AGUCACA | UGUGACU C CGGGAGA |
| 4867 | CAUGCCC CUGAUGAG X CGAA AGGGCCG | CGGCCCU C GGGCAUG |
| 4876 | AGAAUCG CUGAUGAG X CGAA ACAUGCC | GGCAUGU U CGAUUCU |
| 4877 | AAGAAUC CUGAUGAG X CGAA AACAUGC | GCAUGUU C GAUUCUU |
| 4881 | ACCGAAG CUGAUGAG X CGAA AUCGAAC | GUUCGAU U CUUCGGU |
| 4882 | GACCGAA CUGAUGAG X CGAA AAUCGAA | UUCGAUU C UUCGGUC |
| 4884 | AGGACCG CUGAUGAG X CGAA AGAAUCG | CGAUUCU U CGGUCCU |
| 4885 | CAGGACC CUGAUGAG X CGAA AAGAAUC | GAUUCUU C GGUCCUG |
| 4889 | CACACAG CUGAUGAG X CGAA ACCGAAG | CUUCGGU C CUGUGUG |
| 4903 | CGCGUCA CUGAUGAG X CGAA AGCACUC | GAGUGCU A UGACGCG |
| 5011 | UUCCCAG CUGAUGAG X CGAA ACUCCAG | CUGGAGU U CUGGGAA |
| 5012 | UUUCCCA CUGAUGAG X CGAA AACUCCA | UGGAGUU C UGGGAAA |
| 5024 | CUGUGAA CUGAUGAG X CGAA ACGCUUU | AAAGCGU C UUCACAG |
| 5026 | GCCUGUG CUGAUGAG X CGAA AGACGCU | AGCGUCU U CACAGGC |
| 5027 | GGCCUGU CUGAUGAG X CGAA AAGACGC | GCGUCUU C ACAGGCC |
| 5036 | UGUGGGU CUGAUGAG X CGAA AGGCCUG | CAGGCCU C ACCCACA |
| 5045 | GGGCAUC CUGAUGAG X CGAA AUGUGGG | CCCACAU A GAUGCCC |
| 5056 | GGACAGG CUGAUGAG X CGAA AGUGGGC | GCCCACU U CCUGUCC |
| 5057 | GGGACAG CUGAUGAG X CGAA AAGUGGG | CCCACUU C CUGUCCC |
| 5062 | GGUUUGG CUGAUGAG X CGAA ACAGGAA | UUCCUGU C CCAAACC |
| 5089 | GUAAGGG CUGAUGAG X CGAA AGUUGUC | GACAACU U CCCUUAC |
| 5090 | GGUAAGG CUGAUGAG X CGAA AAGUUGU | ACAACUU C CCUUACC |
| 5094 | ACCAGGU CUGAUGAG X CGAA AGGGAAG | CUUCCCU U ACCUGGU |
| 5095 | UACCAGG CUGAUGAG X CGAA AAGGGAA | UUCCCUU A CCUGGUA |
| 5139 | GGAGGUG CUGAUGAG X CGAA AGCCUGA | UCAGGCU C CACCUCC |
| 5145 | CACGAUG CUGAUGAG X CGAA AGGUGGA | UCCACCU C CAUCGUG |
| 5149 | AUCCCAC CUGAUGAG X CGAA AUGGAGG | CCUCCAU C GUGGGAU |
| 5157 | CACAUUU CUGAUGAG X CGAA AUCCCAC | GUGGGAU C AAAUGUG |
| 5172 | CGUAUGA CUGAUGAG X CGAA ACACUUC | GAAGUGU C UCAUACG |
| 5174 | GCCGUAU CUGAUGAG X CGAA AGACACU | AGUGUCU C AUACGGC |
| 5177 | UAAGCCG CUGAUGAG X CGAA AUGAGAC | GUCUCAU A CGGCUUA |
| 5183 | UAGGUUU CUGAUGAG X CGAA AGCCGUA | UACGGCU U AAACCUA |
| 5184 | GUAGGUU CUGAUGAG X CGAA AAGCCGU | ACGGCUU A AACCUAC |
| 5190 | UGCAGCG CUGAUGAG X CGAA AGGUUUA | UAAACCU A CGCUGCA |
| 5225 | CGGCUCC CUGAUGAG X CGAA AGCCUAU | AUAGGCU A GGAGCCG |
| 5234 | CAUUUUG CUGAUGAG X CGAA ACGGCUC | GAGCCGU U CAAAAUG |
| 5235 | UCAUUUU CUGAUGAG X CGAA AACGGCU | AGCCGUU C AAAAUGA |
| 5246 | UGAGGGU CUGAUGAG X CGAA AUCUCAU | AUGAGAU C ACCCUCA |
| 5252 | GAUGUGU CUGAUGAG X CGAA AGGGUGA | UCACCCU C ACACAUC |
| 5259 | GUUAUGG CUGAUGAG X CGAA AUGUGUG | CACACAU C CCAUAAC |
| 5264 | AUUUGGU CUGAUGAG X CGAA AUGGGAU | AUCCCAU A ACCAAAU |
| 5272 | CAUGAUG CUGAUGAG X CGAA AUUUGGU | ACCAAAU U CAUCAUG |
| 5273 | CCAUGAU CUGAUGAG X CGAA AAUUUGG | CCAAAUU C AUCAUGG |
| 5276 | AUGCCAU CUGAUGAG X CGAA AUGAAUU | AAUUCAU C AUGGCAU |
| 5290 | GUCGGCC CUGAUGAG X CGAA ACAUGCA | UGCAUGU C GGCCGAC |
| 5349 | GCGGCCA CUGAUGAG X CGAA AGCUGCA | UGCAGCU C UGGCCGC |
| 5384 | CCACAAU CUGAUGAG X CGAA ACCACAC | GUGUGGU C AUUGUGG |
| 5387 | UACCCAC CUGAUGAG X CGAA AUGACCA | UGGUCAU U GUGGGUA |
| 5394 | AUGAUCC CUGAUGAG X CGAA ACCCACA | UGUGGGU A GGAUCAU |
| 5402 | CGGACAA CUGAUGAG X CGAA AUGAUCC | GGAUCAU U UUGUCCG |
| 5403 | CCGGACA CUGAUGAG X CGAA AAUGAUC | GAUCAUU U UGUCCGG |
| 5404 | CCCGGAC CUGAUGAG X CGAA AAAUGAU | AUCAUUU U GUCCGGG |
| 5407 | CCUCCCG CUGAUGAG X CGAA ACAAAAU | AUUUUGU C CGGGAGG |
| 5441 | GGUAGAG CUGAUGAG X CGAA ACUUCCC | GGGAAGU C CUCUACC |
| 5444 | CCCGGUA CUGAUGAG X CGAA AGGACUU | AAGUCCU C UACCGGG |
| 5446 | CUCCCGG CUGAUGAG X CGAA AGAGGAC | GUCCUCU A CCGGGAG |
| 5455 | UUCAUCG CUGAUGAG X CGAA ACUCCCG | CGGGAGU U CGAUGAA |
| 5456 | UUUCAUC CUGAUGAG X CGAA AACUCCC | GGGAGUU C GAUGAAA |
| 5479 | GAGGUGU CUGAUGAG X CGAA AGGCGCA | UGCGCCU C ACACCUC |
| 5486 | UGUAAGG CUGAUGAG X CGAA AGGUGUG | CACACCU C CCUUACA |
| 5490 | UCGAUGU CUGAUGAG X CGAA AGGGAGG | CCUCCCU U ACAUCGA |
| 5491 | UUCGAUG CUGAUGAG X CGAA AAGGGAG | CUCCCUU A CAUCGAA |
| 5495 | CCUGUUC CUGAUGAG X CGAA AUGUAAG | CUUACAU C GAACAGG |
| 5513 | GCUCGGC CUGAUGAG X CGAA AGCUGCA | UGCAGCU C GCCGAGC |
| 5540 | GCAACCC CUGAUGAG X CGAA AGUGCCU | AGGCACU C GGGUUGC |
| 5545 | UUGCAGC CUGAUGAG X CGAA ACCCGAG | CUCGGGU U GCUGCAA |
| 5644 | GCUGAUG CUGAUGAG X CGAA AGUUCCA | UGGAACU U CAUCAGC |
| 5645 | CGCUGAU CUGAUGAG X CGAA AAGUUCC | GGAACUU C AUCAGCG |
| 5648 | UCCCGCU CUGAUGAG X CGAA AUGAAGU | ACUUCAU C AGCGGGA |
| 5657 | AAUACUG CUGAUGAG X CGAA AUCCCGC | GCGGGAU A CAGUAUU |
| 5662 | UGCUAAA CUGAUGAG X CGAA ACUGUAU | AUACAGU A UUUAGCA |
| 5664 | CCUGCUA CUGAUGAG X CGAA AUACUGU | ACAGUAU U UAGCAGG |
| 5665 | GCCUGCU CUGAUGAG X CGAA AAUACUG | CAGUAUU U AGCAGGC |
| 5666 | AGCCUGC CUGAUGAG X CGAA AAAUACU | AGUAUUU A GCAGGCU |
| 5677 | CAGAGUG CUGAUGAG X CGAA AUAAGCC | GGCUUAU C CACUCUG |
| 5682 | CCAGGCA CUGAUGAG X CGAA AGUGGAU | AUCCACU C UGCCUGG |
| 5702 | GUGAUGC CUGAUGAG X CGAA AUCGCGG | CCGCGAU A GCAUCAC |
| 5707 | CAUCAGU CUGAUGAG X CGAA AUGCUAU | AUAGCAU C ACUGAUG |
| 5719 | GGCUGUG CUGAUGAG X CGAA AUGCCAU | AUGGCAU U CACAGCC |
| 5720 | AGGCUGU CUGAUGAG X CGAA AAUGCCA | UGGCAUU C ACAGCCU |
| 5728 | GGUGAUA CUGAUGAG X CGAA AGGCUGU | ACAGCCU C UAUCACC |
| 5730 | CUGGUGA CUGAUGAG X CGAA AGAGGCU | AGCCUCU A UCACCAG |
| 5732 | GACUGGU CUGAUGAG X CGAA AUAGAGG | CCUCUAU C ACCAGUC |
| 5739 | GUGAGCG CUGAUGAG X CGAA ACUGGUG | CACCAGU C CGCUCAC |
| 5744 | GGGUGGU CUGAUGAG X CGAA AGCGGAC | GUCCGCU C ACCACCC |
| 5757 | AGGAGGG CUGAUGAG X CGAA AUUCUGG | CCAGAAU A CCCUCCU |
| 5762 | UGAACAG CUGAUGAG X CGAA AGGGUAU | AUACCCU C CUGUUCA |
| 5774 | CCCCUAA CUGAUGAG X CGAA AUGUUGA | UCAACAU C UUAGGGG |
| 5776 | UCCCCCU CUGAUGAG X CGAA AGAUGUU | AACAUCU U AGGGGGA |
| 5777 | AUCCCCC CUGAUGAG X CGAA AAGAUGU | ACAUCUU A GGGGGAU |
| 5796 | GCGAGUU CUGAUGAG X CGAA AGCAGCC | GGCUGCU C AACUCGC |
| 5808 | GCACUGG CUGAUGAG X CGAA AGGAGCG | CGCUCCU C CCAGUGC |
| 5820 | AAGGCCG CUGAUGAG X CGAA AGCAGCA | UGCUGCU U CGGCCUU |
| 5885 | UGUCCAC CUGAUGAG X CGAA AGCACCU | AGGUGCU U GUGGACA |
| 5894 | CCGCCAG CUGAUGAG X CGAA AUGUCCA | UGGACAU U CUGGCGG |
| 5895 | CCCGCCA CUGAUGAG X CGAA AAUGUCC | GGACAUU C UGGCGGG |
| 5986 | AGGGAGC CUGAUGAG X CGAA AGUUAAC | GUUAACU U GCUCCCU |
| 5999 | GGGAGAG CUGAUGAG X CGAA AUGGCAG | CUGCCAU C CUCUCCC |
| 6002 | CGGGGGA CUGAUGAG X CGAA AGGAUGG | CCAUCCU C UCCCCCG |
| 6101 | CGAACGC CUGAUGAG X CGAA AUCAGCC | GGCUGAU A GCGUUCG |
| 6112 | ACCCCGC CUGAUGAG X CGAA AAGCGAA | UUCGCUU C GCGGGGU |
| 6120 | ACGUGGU CUGAUGAG X CGAA ACCCCGC | GCGGGGU A ACCACGU |
| 6128 | UGGGGGA CUGAUGAG X CGAA ACGUGGU | ACCACGU U UCCCCCA |
| 6129 | GUGGGGG CUGAUGAG X CGAA AACGUGG | CCACGUU U CCCCCAC |
| 6130 | CGUGGGG CUGAUGAG X CGAA AAACGUG | CACGUUU C CCCCACG |
| 6142 | AGGCACG CUGAUGAG X CGAA AGUGCGU | ACGCACU A CGUGCCU |
| 6173 | UCUGAGU CUGAUGAG X CGAA ACACGUG | CACGUGU A ACUCAGA |
| 6177 | AGGAUCU CUGAUGAG X CGAA AGUUACA | UGUAACU C AGAUCCU |
| 6182 | UGGAGAG CUGAUGAG X CGAA AUCUGAG | CUCAGAU C CUCUCCA |
| 6185 | GGCUGGA CUGAUGAG X CGAA AGGAUCU | AGAUCCU C UCCAGCC |
| 6187 | GAGGCUG CUGAUGAG X CGAA AGAGGAU | AUCCUCU C CAGCCUC |
| 6194 | UGAUGGU CUGAUGAG X CGAA AGGCUGG | CCAGCCU C ACCAUCA |
| 6200 | GCUGAGU CUGAUGAG X CGAA AUGGUGA | UCACCAU C ACUCAGC |
| 6204 | AGCAGCU CUGAUGAG X CGAA AGUGAUG | CAUCACU C AGCUGCU |
| 6221 | ACUGGUG CUGAUGAG X CGAA AGCCUCU | AGAGGCU U CACCAGU |
| 6222 | CACUGGU CUGAUGAG X CGAA AAGCCUC | GAGGCUU C ACCAGUG |
| 6233 | CCUCAUU CUGAUGAG X CGAA AUCCACU | AGUGGAU U AAUGAGG |
| 6234 | UCCUCAU CUGAUGAG X CGAA AAUCCAC | GUGGAUU A AUGAGGA |
| 6247 | UGGCGUG CUGAUGAG X CGAA AGCAGUC | GACUGCU C CACGCCA |
| 6259 | CGAGCCG CUGAUGAG X CGAA AGCAUGG | CCAUGCU C CGGCUCG |
| 6265 | UAGCCAC CUGAUGAG X CGAA AGCCGGA | UCCGGCU C GUGGCUA |
| 6272 | CAUCCUU CUGAUGAG X CGAA AGCCACG | CGUGGCU A AAGGAUG |
| 6281 | AGUCCCA CUGAUGAG X CGAA ACAUCCU | AGGAUGU U UGGGACU |
| 6282 | CAGUCCC CUGAUGAG X CGAA AACAUCC | GGAUGUU U GGGACUG |
| 6293 | CCGUGCA CUGAUGAG X CGAA AUCCAGU | ACUGGAU A UGCACGG |
| 6304 | GUCAGUC CUGAUGAG X CGAA ACACCGU | ACGGUGU U GACUGAC |
| 6313 | GGUCUUG CUGAUGAG X CGAA AGUCAGU | ACUGACU U CAAGACC |
| 6314 | AGGUCUU CUGAUGAG X CGAA AAGUCAG | CUGACUU C AAGACCU |
| 6326 | UGGACUG CUGAUGAG X CGAA AGCCAGG | CCUGGCU C CAGUCCA |
| 6331 | GAGCUUG CUGAUGAG X CGAA ACUGGAG | CUCCAGU C CAAGCUC |
| 6338 | UCGGCAG CUGAUGAG X CGAA AGCUUGG | CCAAGCU C CUGCCGA |
| 6349 | UCCCGGC CUGAUGAG X CGAA AUUUCGG | CCGAAAU U GCCGGGA |
| 6359 | AGAAAGG CUGAUGAG X CGAA ACUCCCG | CGGGAGU C CCUUUCU |
| 6363 | GAGAAGA CUGAUGAG X CGAA AGGGACU | AGUCCCU U UCUUCUC |
| 6364 | UGAGAAG CUGAUGAG X CGAA AAGGGAC | GUCCCUU U CUUCUCA |
| 6365 | AUGAGAA CUGAUGAG X CGAA AAAGGGA | UCCCUUU C UUCUCAU |
| 6367 | GCAUGAG CUGAUGAG X CGAA AGAAAGG | CCUUUCU U CUCAUGC |
| 6368 | GGCAUGA CUGAUGAG X CGAA AAGAAAG | CUUUCUU C UCAUGCC |
| 6370 | UUGGCAU CUGAUGAG X CGAA AGAAGAA | UUCUUCU C AUGCCAA |
| 6385 | UCCCUUG CUGAUGAG X CGAA ACCCGCG | CGCGGGU A CAAGGGA |
| 6395 | CCCGCCA CUGAUGAG X CGAA ACUCCCU | AGGGAGU C UGGCGGG |
| 6446 | GUCCGGU CUGAUGAG X CGAA AUUUGUG | CACAAAU U ACCGGAC |
| 6447 | UGUCCGG CUGAUGAG X CGAA AAUUUGU | ACAAAUU A CCGGACA |
| 6458 | CGUUUUU CUGAUGAG X CGAA ACAUGUC | GACAUGU C AAAAACG |
| 6468 | CUCAUGG CUGAUGAG X CGAA ACCGUUU | AAACGGU U CCAUGAG |
| 6469 | CCUCAUG CUGAUGAG X CGAA AACCGUU | AACGGUU C CAUGAGG |
| 6479 | GCCCAAC CUGAUGAG X CGAA AUCCUCA | UGAGGAU C GUUGGGC |
| 6482 | UAGGCCC CUGAUGAG X CGAA ACGAUCC | GGAUCGU U GGGCCUA |
| 6489 | CAGGUUU CUGAUGAG X CGAA AGGCCCA | UGCGCCU A AAACCUG |
| 6520 | GAUGGGG CUGAUGAG X CGAA ACGUUCC | GGAACGU U CCCCAUC |
| 6521 | UGAUGGG CUGAUGAG X CGAA AACGUUC | GAACGUU C CCCAUCA |
| 6527 | ACGCGUU CUGAUGAG X CGAA AUGGGGA | UCCCCAU C AACGCGU |
| 6535 | UGUGGUG CUGAUGAG X CGAA ACGCGUU | AACGCGU A CACCACA |
| 6559 | CGCCGGG CUGAUGAG X CGAA AGGGUGU | ACACCCU C CCCGGCG |
| 6610 | CUCCACG CUGAUGAG X CGAA ACUCUUC | GAAGAGU A CGUGGAG |
| 6620 | CCCGCGU CUGAUGAG X CGAA AUCUCCA | UGGAGAU U ACGCGGG |
| 6621 | ACCCGCG CUGAUGAG X CGAA AAUCUCC | GGAGAUU A CGCGGGU |
| 6654 | GUGGUCA CUGAUGAG X CGAA ACCCGUC | GACGGGU A UGACCAC |
| 6689 | GGGCCGG CUGAUGAG X CGAA ACCUGGC | GCCAGGU C CCGGCCC |
| 6781 | GACCUGG CUGAUGAG X CGAA AUGUGAC | GUCACAU U CCAGGUC |
| 6854 | UGGAAGU CUGAUGAG X CGAA AGCACUG | CAGUGCU C ACUUCCA |
| 6858 | AGCAUGG CUGAUGAG X CGAA AGUGAGC | GCUCACU U CCAUGCU |
| 6859 | GAGCAUG CUGAUGAG X CGAA AAGUGAG | CUCACUU C CAUGCUC |
| 6866 | GGUCGGU CUGAUGAG X CGAA AGCAUGG | CCAUGCU C ACCGACC |
| 6877 | AAUGUGG CUGAUGAG X CGAA AGGGGUC | GACCCCU C CCACAUU |
| 6884 | CUGCUGU CUGAUGAG X CGAA AUGUGGG | CCCACAU U ACAGCAG |
| 6885 | UCUGCUG CUGAUGAG X CGAA AAUGUGG | CCACAUU A CAGCAGA |
| 6900 | CUACGUU CUGAUGAG X CGAA AGCCGUC | GACGGCU A AACGUAG |
| 6945 | CUAGCUG CUGAUGAG X CGAA AGAGCUG | CAGCUCU U CAGCUAG |
| 6946 | GCUAGCU CUGAUGAG X CGAA AAGAGCU | AGCUCUU C AGCUAGC |
| 6951 | AAUUGGC CUGAUGAG X CGAA AGCUGAA | UUCAGCU A GCCAAUU |
| 6969 | UUCAAGG CUGAUGAG X CGAA AGGCGCA | UGCGCCU U CCUUGAA |
| 6970 | CUUCAAG CUGAUGAG X CGAA AAGGCGC | GCGCCUU C CUUGAAG |
| 6973 | UGCCUUC CUGAUGAG X CGAA AGGAAGG | CCUUCCU U GAAGGCA |
| 6990 | UGGUGGG CUGAUGAG X CGAA AGUGCAU | AUGCACU A CCCACCA |
| 7003 | GUCCGGG CUGAUGAG X CGAA AGUCAUG | CAUGACU C CCCGGAC |
| 7019 | CCUCGAU CUGAUGAG X CGAA AGGUCAG | CUGACCU C AUCGAGG |
| 7022 | UGGCCUC CUGAUGAG X CGAA AUGAGGU | ACCUCAU C GAGGCCA |
| 7064 | CACGGGU CUGAUGAG X CGAA AUGUUUC | GAAACAU C ACCCGUG |
| 7078 | AUUCUCU CUGAUGAG X CGAA ACUCCAC | GUGGAGU C AGAGAAU |
| 7086 | ACCACCU CUGAUGAG X CGAA AUUCUCU | AGAGAAU A AGGUGGU |
| 7094 | CCAAAAU CUGAUGAG X CGAA ACCACCU | AGGUGGU A AUUUUGG |
| 7097 | AGUCCAA CUGAUGAG X CGAA AUUACCA | UGGUAAU U UUGGACU |
| 7098 | GAGUCCA CUGAUGAG X CGAA AAUUACC | GGUAAUU U UGGACUC |
| 7099 | AGAGUCC CUGAUGAG X CGAA AAAUUAC | GUAAUUU U GGACUCU |
| 7105 | GUCGAAA CUGAUGAG X CGAA AGUCCAA | UUGGACU C UUUCGAC |
| 7107 | GGGUCGA CUGAUGAG X CGAA AGAGUCC | GGACUCU U UCGACCC |
| 7108 | CGGGUCG CUGAUGAG X CGAA AAGAGUC | GACUCUU U CGACCCG |
| 7109 | GCGGGUC CUGAUGAG X CGAA AAAGAGU | ACUCUUU C GACCCGC |
| 7147 | UGCAACG CUGAUGAG X CGAA AUACUUC | GAAGUAU C CGUUGCA |
| 7151 | CUGCUGC CUGAUGAG X CGAA ACGGAUA | UAUCCGU U GCAGCAG |
| 7163 | UUCGCAG CUGAUGAG X CGAA AUCUCUG | CAGAGAU C CUGCGAA |
| 7174 | CUUCUUG CUGAUGAG X CGAA AUUUUCG | CGAAAAU C CAAGAAG |
| 7183 | GGGGGGG CUGAUGAG X CGAA ACUUCUU | AAGAAGU U CCCCCCC |
| 7184 | CGGGGGG CUGAUGAG X CGAA AACUUCU | AGAAGUU C CCCCCCG |
| 7227 | AACAGUG CUGAUGAG X CGAA AGGGUUG | CAACCCU C CACUGUU |
| 7240 | UUUCCAG CUGAUGAG X CGAA ACUCUAA | UUAGAGU C CUGGAAA |
| 7308 | GGUAUUG CUGAUGAG X CGAA AGGGCCC | GGGCCCU C CAAUACC |
| 7313 | GAGGCGG CUGAUGAG X CGAA AUUGGAG | CUCCAAU A CCGCCUC |
| 7320 | UUCCGUG CUGAUGAG X CGAA AGGCGGU | ACCGCCU C CACGGAA |
| 7340 | UCAGAAC CUGAUGAG X CGAA ACCGUCC | GGACGGU U GUUCUGA |
| 7343 | CUGUCAG CUGAUGAG X CGAA ACAACCG | CGGUUGU U CUGACAG |
| 7344 | UCUGUCA CUGAUGAG X CGAA AACAACC | GGUUGUU C UGACAGA |
| 7363 | GGCAGAA CUGAUGAG X CGAA ACACGGU | ACCGUGU C UUCUGCC |
| 7365 | AAGGCAG CUGAUGAG X CGAA AGACACG | CGUGUCU U CUGCCUU |
| 7366 | CAAGGCA CUGAUGAG X CGAA AAGACAC | GUGUCUU C UGCCUUG |
| 7372 | CUCCGCC CUGAUGAG X CGAA AGGCAGA | UCUGCCU U GGCGGAG |
| 7405 | CGAUCCG CUGAUGAG X CGAA AGCUGCC | GGCAGCU C CGGAUCG |
| 7446 | UGAUCGG CUGAUGAG X CGAA AGGGGCG | CGCCCCU C CCGAUCA |
| 7452 | GAGGUCU CUGAUGAG X CGAA AUCGGGA | UCCCGAU C AGACCUC |
| 7459 | GUCGUCA CUGAUGAG X CGAA AGGUCUG | CAGACCU C UGACGAC |
| 7480 | AACGUCA CUGAUGAG X CGAA AUUCUUU | AAAGAAU C UGACGUU |
| 7487 | ACGACUC CUGAUGAG X CGAA ACGUCAG | CUGACGU U GAGUCGU |
| 7492 | GGAGUAC CUGAUGAG X CGAA ACUCAAC | GUUGAGU C GUACUCC |
| 7495 | GGAGGAG CUGAUGAG X CGAA ACGACUC | GAGUCGU A CUCCUCC |
| 7609 | CCAUGUG CUGAUGAG X CGAA AGGACAU | AUGUCCU A CACAUGG |
| 7631 | AUGGCGU CUGAUGAG X CGAA AUCAGGG | CCCUGAU C ACGCCAU |
| 7675 | GUUGCUC CUGAUGAG X CGAA ACGCGUU | AACGCGU U GAGCAAC |
| 7684 | CAGCAGA CUGAUGAG X CGAA AGUUGCU | AGCAACU C UCUGCUG |
| 7686 | CGCAGCA CUGAUGAG X CGAA AGAGUUG | CAACUCU C UGCUGCG |
| 7695 | UUGUGGU CUGAUGAG X CGAA ACGCAGC | GCUGCGU C ACCACAA |
| 7709 | UGGCAUA CUGAUGAG X CGAA ACCAUGU | ACAUGGU C UAUGCCA |
| 7711 | UGUGGCA CUGAUGAG X CGAA AGACCAU | AUGGUCU A UGCCACA |
| 7754 | CAAAGGU CUGAUGAG X CGAA ACCUUCU | AGAAGGU C ACCUUUG |
| 7759 | UCUGUCA CUGAUGAG X CGAA AGGUGAC | GUCACCU U UGACAGA |
| 7760 | GUCUGUC CUGAUGAG X CGAA AAGGUGA | UCACCUU U GACAGAC |
| 7802 | UCUCCUU CUGAUGAG X CGAA AGCACGU | ACGUGCU C AAGGAGA |
| 7825 | AACUGUG CUGAUGAG X CGAA ACGCCUU | AAGGCGU C CACAGUU |
| 7832 | UAGCCUU CUGAUGAG X CGAA ACUGUGG | CCACAGU U AAGGCUA |
| 7833 | UUAGCCU CUGAUGAG X CGAA AACUGUG | CACAGUU A AGGCUAA |
| 7844 | CGGAUAG CUGAUGAG X CGAA AGUUUAG | CUAAACU U CUAUCCG |
| 7845 | ACGGAUA CUGAUGAG X CGAA AAGUUUA | UAAACUU C UAUCCGU |
| 7884 | UUGGCCG CUGAUGAG X CGAA AUGUGGG | CCCACAU U CGGCCAA |
| 7885 | UUUGGCC CUGAUGAG X CGAA AAUGUGG | CCACAUU C GGCCAAA |
| 7922 | GGUUCCG CUGAUGAG X CGAA ACGUCCU | AGGACGU C CGGAACC |
| 7931 | UGCUGGA CUGAUGAG X CGAA AGGUUCC | GGAACCU A UCCAGCA |
| 7933 | CUUGCUG CUGAUGAG X CGAA AUAGGUU | AACCUAU C CAGCAAG |
| 7946 | UGUGGUU CUGAUGAG X CGAA AUGGCCU | AGGCCAU U AACCACA |
| 7947 | AUGUGGU CUGAUGAG X CGAA AAUGGCC | GGCCAUU A ACCACAU |
| 8000 | UGGUGUC CUGAUGAG X CGAA AUUGGUG | CACCAAU U GACACCA |
| 8012 | UUGCCAU CUGAUGAG X CGAA AUGGUGG | CCACCAU C AUGGCAA |
| 8030 | CGCAGAA CUGAUGAG X CGAA ACUUCAC | GUGAAGU U UUCUGCG |
| 8031 | ACGCAGA CUGAUGAG X CGAA AACUUCA | UGAAGUU U UCUGCGU |
| 8032 | GACGCAG CUGAUGAG X CGAA AAACUUC | GAAGUUU U CUGCGUC |
| 8033 | GGACGCA CUGAUGAG X CGAA AAAACUU | AAGUUUU C UGCGUCC |
| 8039 | CCGGUUG CUGAUGAG X CGAA ACGCAGA | UCUGCGU C CAACCGG |
| 8070 | AUAAGGC CUGAUGAG X CGAA AGCUGGC | GCCAGCU C GCCUUAU |
| 8081 | CUGGGAA CUGAUGAG X CGAA ACGAUAA | UUAUCGU A UUCCCAG |
| 8083 | GUCUGGG CUGAUGAG X CGAA AUACGAU | AUCGUAU U CCCAGAC |
| 8084 | GGUCUGG CUGAUGAG X CGAA AAUACGA | UCGUAUU C CCAGACC |
| 8099 | AUACACG CUGAUGAG X CGAA ACUCCCA | UGGGAGU U CGUGUAU |
| 8100 | CAUACAC CUGAUGAG X CGAA AACUCCC | GGGAGUU C GUGUAUG |
| 8105 | UCUCGCA CUGAUGAG X CGAA ACACGAA | UUCGUGU A UGCGAGA |
| 8121 | UCGUAAA CUGAUGAG X CGAA AGCCAUU | AAUGGCU C UUUACGA |
| 8123 | CGUCGUA CUGAUGAG X CGAA AGAGCCA | UGGCUCU U UACGACG |
| 8124 | ACGUCGU CUGAUGAG X CGAA AAGAGCC | GGCUCUU U ACGACGU |
| 8125 | CACGUCG CUGAUGAG X CGAA AAAGAGC | GCUCUUU A CGACGUG |
| 8135 | GGGUGGA CUGAUGAG X CGAA ACCACGU | ACGUGGU C UCCACCC |
| 8137 | AAGGGUG CUGAUGAG X CGAA AGACCAC | GUGGUCU C CACCCUU |
| 8144 | CCUGAGG CUGAUGAG X CGAA AGGGUGG | CCACCCU U CCUCAGG |
| 8145 | GCCUGAG CUGAUGAG X CGAA AAGGGUG | CACCCUU C CUCAGGC |
| 8148 | ACGGCCU CUGAUGAG X CGAA AGGAAGG | CCUUCCU C AGGCCGU |
| 8164 | GUACGAG CUGAUGAG X CGAA AGCCCAU | AUGGGCU C CUCGUAC |
| 8167 | UCCGUAC CUGAUGAG X CGAA AGGAGCC | GGCUCCU C GUACGGA |
| 8177 | AGUACUG CUGAUGAG X CGAA AAUCCGU | ACGGAUU C CAGUACU |
| 8185 | CCCAGGA CUGAUGAG X CGAA AGUACUG | CAGUACU C UCCUGGG |
| 8241 | AAGCCCA CUGAUGAG X CGAA AGGGCUU | AAGCCCU A UGGGCUU |
| 8248 | AUACGAG CUGAUGAG X CGAA AGCCCAU | AUGGGCU U CUCGUAU |
| 8249 | CAUACGA CUGAUGAG X CGAA AAGCCCA | UGGGCUU C UCGUAUG |
| 8251 | GUCAUAC CUGAUGAG X CGAA AGAAGCC | GGCUUCU C GUAUGAC |
| 8254 | GGUGUCA CUGAUGAG X CGAA ACGAGAA | UUCUCGU A UGACACC |
| 8269 | UGAGUCA CUGAUGAG X CGAA AGGACCG | CGCUGCU U UGACUCA |
| 8270 | UUGAGUC CUGAUGAG X CGAA AAGCAGC | GCUGCUU U GACUCAA |
| 8275 | GACUGUU CUGAUGAG X CGAA AGUCAAA | UUUGACU C AACAGUC |
| 8282 | UCUCAGU CUGAUGAG X CGAA ACUGUUG | CAACAGU C ACUGAGA |
| 8297 | CAACACG CUGAUGAG X CGAA AUGUCGC | GCGACAU C CGUGUUG |
| 8303 | ACUCCUC CUGAUGAG X CGAA ACACGGA | UCCGUGU U GAGGAGU |
| 8311 | GUAGAUU CUGAUGAG X CGAA ACUCCUC | GAGGAGU C AAUCUAC |
| 8315 | AUUGGUA CUGAUGAG X CGAA AUUGACU | AGUCAAU C UACCAAU |
| 8317 | ACAUUGG CUGAUGAG X CGAA AGAUUGA | UCAAUCU A CCAAUGU |
| 8325 | AAGUCAC CUGAUGAG X CGAA ACAUUGG | CCAAUGU U GUGACUU |
| 8332 | GGGGGCC CUGAUGAG X CGAA AGUCACA | UGUGACU U GGCCCCC |
| 8400 | UUUGAAU CUGAUGAG X CGAA AGUCAGG | CCUGACU A AUUCAAA |
| 8403 | CCUUUUG CUGAUGAG X CGAA AUUAGUC | GACUAAU U CAAAAGG |
| 8404 | CCCUUUU CUGAUGAG X CGAA AAUUAGU | ACUAAUU C AAAAGGG |
| 8472 | GUGAGGG CUGAUGAG X CGAA AUUGCCG | CGGCAAU A CCCUCAC |
| 8477 | AGCAUGU CUGAUGAG X CGAA AGGGUAU | AUACCCU C ACAUGCU |
| 8485 | UUUCAAG CUGAUGAG X CGAA AGCAUGU | ACAUGCU A CUUGAAA |
| 8488 | GGCUUUC CUGAUGAG X CGAA AGUAGCA | UGCUACU U GAAAGCC |
| 8565 | UCACAGA CUGAUGAG X CGAA AACGACA | UGUCGUU A UCUGUGA |
| 8567 | UUUCACA CUGAUGAG X CGAA AUAACGA | UCGUUAU C UGUGAAA |
| 8606 | AGACUCG CUGAUGAG X CGAA AGGCUCG | CGAGCCU A CGAGUCU |
| 8612 | CCGUGAA CUGAUGAG X CGAA ACUCGUA | UACGAGU C UUCACGG |
| 8614 | CUCCGUG CUGAUGAG X CGAA AGACUCG | CGAGUCU U CACGGAG |
| 8615 | CCUCCGU CUGAUGAG X CGAA AAGACUC | GAGUCUU C ACGGAGG |
| 8625 | CUAGUCA CUGAUGAG X CGAA AGCCUCC | GGAGGCU A UGACUAG |
| 8631 | GAGUACC CUGAUGAG X CGAA AGUCAUA | UAUGACU A GGUACUC |
| 8635 | GGCAGAG CUGAUGAG X CGAA ACCUAGU | ACUAGGU A CUCUGCC |
| 8677 | CAACUCC CUGAUGAG X CGAA AGUCGUA | UACGACU U GGAGUUG |
| 8683 | UGUUAUC CUGAUGAG X CGAA ACUCCAA | UUGGAGU U GAUAACA |
| 8687 | AUGAUGU CUGAUGAG X CGAA AUCAACU | AGUUGAU A ACAUCAU |
| 8692 | GGAGCAU CUGAUGAG X CGAA AUGUUAU | AUAACAU C AUGCUCC |
| 8710 | CGCGACC CUGAUGAG X CGAA ACACGUU | AACGUGU C GGUCGCG |
| 8714 | CGUGCGC CUGAUGAG X CGAA ACCGACA | UGUCGGU C GCGCACG |
| 8743 | GAGGUAG CUGAUGAG X CGAA ACACUCU | AGAGUGU A CUACCUC |
| 8746 | AGUGAGG CUGAUGAG X CGAA AGUACAC | GUGUACU A CCUCACU |
| 8750 | CACGAGU CUGAUGAG X CGAA AGGUAGU | ACUACCU C ACUCGUG |
| 8754 | GGAUCAC CUGAUGAG X CGAA AGUGAGG | CCUCACU C GUGAUCC |
| 8760 | GUGGUGG CUGAUGAG X CGAA AUCACGA | UCGUGAU C CCACCAC |
| 8799 | GUGUGUC CUGAUGAG X CGAA AGCUGUC | GACAGCU A GACACAC |
| 8808 | UUGACUG CUGAUGAG X CGAA AGUGUGU | ACACACU C CAGUCAA |
| 8813 | AGGAGUU CUGAUGAG X CGAA ACUGGAG | CUCCAGU C AACUCCU |
| 8818 | UAGCCAG CUGAUGAG X CGAA AGUUGAC | GUCAACU C CUGGCUA |
| 8825 | UGUUGCC CUGAUGAG X CGAA AGCCAGG | CCUGGCU A GGCAACA |
| 8834 | ACAUGAU CUGAUGAG X CGAA AUGUUGC | GCAACAU C AUCAUGU |
| 8837 | CAUACAU CUGAUGAG X CGAA AUGAUGU | ACAUCAU C AUGUAUG |
| 8870 | UCAUCAA CUGAUGAG X CGAA AUCAUCC | GGAUGAU U UUGAUGA |
| 8872 | AGUCAUC CUGAUGAG X CGAA AAAUCAU | AUGAUUU U GAUGACU |
| 8884 | GGAGAAG CUGAUGAG X CGAA AGUGAGU | ACUCACU U CUUCUCC |
| 8885 | UGGAGAA CUGAUGAG X CGAA AAGUGAG | CUCACUU C UUCUCCA |
| 8887 | GAUGGAG CUGAUGAG X CGAA AGAAGUG | CACUUCU U CUCCAUC |
| 8888 | GGAUGGA CUGAUGAG X CGAA AAGAAGU | ACUUCUU C UCCAUCC |
| 8890 | AAGGAUG CUGAUGAG X CGAA AGAAGAA | UUCUUCU C CAUCCUU |
| 8894 | CUAGAAG CUGAUGAG X CGAA AUGGAGA | UCUCCAU C CUUCUAG |
| 8897 | GGGCUAG CUGAUGAG X CGAA AGGAUGG | CCAUCCU U CUAGCCC |
| 8898 | UGGGCUA CUGAUGAG X CGAA AAGGAUG | CAUCCUU C UAGCCCA |
| 8900 | CCUGGGC CUGAUGAG X CGAA AGAAGGA | UCCUUCU A GCCCAGG |
| 8915 | CCUUUUC CUGAUGAG X CGAA AGCUGUU | AACAGCU U GAAAAGG |
| 8952 | AUGGAGU CUGAUGAG X CGAA ACAGGCC | GGCCUGU U ACUCCAU |
| 8953 | AAUGGAG CUGAUGAG X CGAA AACAGGC | GCCUGUU A CUCCAUU |
| 8956 | CUCAAUG CUGAUGAG X CGAA AGUAACA | UGUUACU C CAUUGAG |
| 8960 | GUGGCUC CUGAUGAG X CGAA AUGGAGU | ACUCCAU U GAGCCAC |
| 8969 | GUAGGUC CUGAUGAG X CGAA AGUGGCU | AGCCACU U GACCUAC |
| 8975 | UCUGAGG CUGAUGAG X CGAA AGGUCAA | UUGACCU A CCUCAGA |
| 8979 | AUGAUCU CUGAUGAG X CGAA AGGUAGG | CCUACCU C AGAUCAU |
| 8984 | GUUGAAU CUGAUGAG X CGAA AUCUGAG | CUCAGAU C AUUCAAC |
| 8987 | GUCGUUG CUGAUGAG X CGAA AUGAUCU | AGAUCAU U CAACGAC |
| 8988 | AGUCGUU CUGAUGAG X CGAA AAUGAUC | GAUCAUU C AACGACU |
| 8996 | GACCAUG CUGAUGAG X CGAA AGUCGUU | AACGACU C CAUGGUC |
| 9003 | GCGCUAA CUGAUGAG X CGAA ACCAUGG | CCAUGGU C UUAGCGC |
| 9005 | AUGCGCU CUGAUGAG X CGAA AGACCAU | AUGGUCU U AGCGCAU |
| 9006 | AAUGCGC CUGAUGAG X CGAA AAGACCA | UGGUCUU A GCGCAUU |
| 9013 | GAGUGAG CUGAUGAG X CGAA AUGCGCU | AGCGCAU U CUCACUC |
| 9014 | GGAGUGA CUGAUGAG X CGAA AAUGCGC | GCGCAUU C UCACUCC |
| 9016 | AUGGAGU CUGAUGAG X CGAA AGAAUGC | GCAUUCU C ACUCCAU |
| 9020 | AACUAUG CUGAUGAG X CGAA AGUGAGA | UCUCACU C CAUAGUU |
| 9024 | GAGUAAC CUGAUGAG X CGAA AUGGAGU | ACUCCAU A GUUACUC |
| 9027 | GGAGAGU CUGAUGAG X CGAA ACUAUGG | CCAUAGU U ACUCUCC |
| 9028 | UGGAGAG CUGAUGAG X CGAA AACUAUG | CAUAGUU A CUCUCCA |
| 9031 | ACCUGGA CUGAUGAG X CGAA AGUAACU | AGUUACU C UCCAGGU |
| 9033 | UCACCUG CUGAUGAG X CGAA AGAGUAA | UUACUCU C CAGGUGA |
| 9044 | CCCUAUU CUGAUGAG X CGAA AUCUCAC | GUGAGAU C AAUAGGG |
| 9048 | GCCACCC CUGAUGAG X CGAA AUUGAUC | GAUCAAU A GGGUGGC |
| 9057 | AGGCAUG CUGAUGAG X CGAA AGCCACC | GGUGGCU U CAUGCCU |
| 9058 | GAGGCAU CUGAUGAG X CGAA AAGCCAC | GUGGCUU C AUGCCUC |
| 9105 | CUGGCCC CUGAUGAG X CGAA AUGUCUC | GAGACAU C GGGCCAG |
| 9169 | GAAGAGG CUGAUGAG X CGAA ACUUGCC | GGCAAGU A CCUCUUC |
| 9173 | AGUUGAA CUGAUGAG X CGAA AGGUACU | AGUACCU C UUCAACU |
| 9175 | CCAGUUG CUGAUGAG X CGAA AGAGGUA | UACCUCU U CAACUGG |
| 9176 | CCCAGUU CUGAUGAG X CGAA AAGAGGU | ACCUCUU C AACUGGG |
| 9188 | UGGUCCU CUGAUGAG X CGAA ACUGCCC | GGGCAGU A AGGACCA |
| 9200 | UGAGUUU CUGAUGAG X CGAA AGCUUGG | CCAAGCU C AAACUCA |
| 9206 | UUGGAGU CUGAUGAG X CGAA AGUUUGA | UCAAACU C ACUCCAA |
| 9210 | GGGAUUG CUGAUGAG X CGAA AGUGAGU | ACUCACU C CAAUCCC |
| 9215 | CGGCCGG CUGAUGAG X CGAA AUUGGAG | CUCCAAU C CCGGCCG |
| 9261 | CCGCUGU CUGAUGAG X CGAA ACCACCA | UGCUGGU U ACAGCGG |
| 9262 | CCCGCUG CUGAUGAG X CGAA AACCAGC | GCUGGUU A CAGCGGG |
| 9294 | CGGGCAC CUGAUGAG X CGAA AGACAGG | CCUGUCU C GUGCCCG |
| 9313 | CCACAUA CUGAUGAG X CGAA ACCAGCG | CGCUGGU U UAUGUGG |
| 9314 | ACCACAU CUGAUGAG X CGAA AACCAGC | GCUGGUU U AUGUGGU |
| 9315 | CACCACA CUGAUGAG X CGAA AAACCAG | CUGGUUU A UGUGGUG |
| 9409 | AAAAGGG CUGAUGAG X CGAA AUGGCCU | AGGCCAU C CCCUUUU |
| 9414 | AAAAAAA CUGAUGAG X CGAA AGGGGAU | AUCCCCU U UUUUUUU |

Where “X” represents stem II region of a HH ribozyme (Hertel et al., 1992 Nucleic Acids Res. 20: 3252). The length of stem II may be ≧2 base-pairs.

[0170] TABLE VII
HCV Hairpin (HP) Ribozyme and Target Sequence

| | | |
|---|---|---|
| Pos. | Ribozyme Sequence | Substrate |

| | | |
|---|---|---|
| 10 | CCCCCA AGAA GGGG ACCAGAGAAACA X GUACAUUACCUGGUA | CCCC CGAU UGGGGG |
| 59 | CGUGAA AGAA GUAG ACCAGAGAAACA X GUACAUUACCUGGUA | CUAC UGUC UUCACG |
| 109 | CCUGGA AGAA GCAC ACCAGAGAAACA X GUACAUUACCUGGUA | GUOC AGCC UCCAGG |
| 209 | GCAUUG AGAA GGUU ACCAGAGAAACA X GUACAUUACCUGGUA | AACC CGCU CAAUGC |
| 290 | CUAUCA AGAA GUAC ACCAGAGAAACA X GUACAUUACCUGGUA | GUAC UGCC UGAUAG |
| 390 | GUGGGC AGAA GUAG ACCAGAGAAACA X GUACAUUACCUGGUA | CUAC CGCC GCCCAC |
| 393 | CCUGUG AGAA GCGG ACCAGAGAAACA X GUACAUUACCUGGUA | CCGC CGCC CACAGG |
| 427 | CCAACG AGAA GACC ACCAGAGAAACA X GUACAUUACCUGGUA | OGUC AGAU CGUUGG |
| 505 | GGUUGC AGAA GUUC ACCAGAGAAACA X GUACAUUACCUGGUA | GAAC GGUC GCAACC |
| 549 | CCUCGG AGAA GCGA ACCAGAGAAACA X GUACAUUACCUGGUA | UCGC CGAC CCGAGG |
| 574 | UACCCA AGAA GAGC ACCAGAGAAACA X GUACAUUACCUGGUA | GCUC AGCC UGGGUA |
| 645 | GCCGGG AGAA GCGG ACCAGAGAAACA X GUACAUUACCUGGUA | CCGC GGCU CCCGGC |
| 652 | CAACUA AGAA GOGA ACCAGAGAAACA X GUACAUUACCUGGUA | UCCC GGCC UAGUUG |
| 671 | CCGGGG AGAA GUGG ACCAGAGAAACA X GUACAUUACCUGGUA | CCAC GGAC CCCCGG |
| 726 | CGGCGA AGAA GCAC ACCAGAGAAACA X GUACAUUACCUGGUA | GUGC GGCU UCGCCG |
| 734 | CAUGAG AGAA GCGA ACCAGAGAAACA X GUACAUUACCUGGUA | UCGC CGAC CUCAUG |
| 754 | CCGACG AGAA GAAU ACCAGAGAAACA X GUACAUUACCUGGUA | AUUC CGCU CGUCGG |
| 852 | AAGAGC AGAA GGGC ACCAGAGAAACA X GUACAUUACCUGGUA | GCCC GGUU GCUCUU |
| 883 | CAGGAC AGAA GGGC ACCAGAGAAACA X GUACAUUACCUGGUA | GCCC UGCU GUCCUG |
| 886 | AAACAG AGAA GCAG ACCAGAGAAACA X GUACAUUACCUGGUA | CUGC UGUC CUGUUU |
| 891 | UCCUCA AGAA GGAC ACCAGAGAAACA X GUACAUUACCUGGUA | GUCC UGUU UGACCA |
| 905 | AGGGGA AGAA GGGA ACCAGAGAAACA X GUACAUUACCUGGUA | UCCC AGCU UCCGCU |
| 911 | CUGAUA AGAA GAAG ACCAGAGAAACA X GUACAUUACCUGGUA | CUUC CGCU UAUCAG |
| 960 | AGUUGG AGAA GUCA ACCAGAGAAACA X GUACAUUACCUGGUA | UGAC UGCU CCAACU |
| 1050 | CCCAAC AGAA GGAG ACCAGAGAAACA X GUACAUUACCUGGUA | CUCC CGUW GUUGGG |
| 1145 | GAAAGC AGAA GCCC ACCAGAGAAACA X GUACAUUACCUGGUA | GGGC GGCC GCUUUC |
| 1148 | ACAGAA AGAA GCCG ACCAGAGAAACA X GUACAUUACCUGGUA | CGGC CGCU UUCUGU |
| 1155 | UGGCGG AGAA GAAA ACCAGAGAAACA X GUACAUUACCUGGUA | UUUC UGUU CCGCCA |
| 1185 | AAACGG AGAA GCAG ACCAGAGAAACA X GUACAUUACCUGGUA | CUGC GGAU CCGUUU |
| 1190 | GAGGAA AGAA GAUC ACCAGAGAAACA X GUACAUUACCUGGUA | GAUC CGUU UUCCUC |
| 1207 | GUGAAC AGAA CGCA ACCAGAGAAACA X GUACAUUACCUGGUA | UCCC AGUU GUUCAC |
| 1331 | CACUAG AGAA GUUG ACCAGAGAAACA X GUACAUUACCUGGUA | CAAC AGCC CUAGUG |
| 1357 | UGUGGG AGAA GGAG ACCAGAGAAACA X GUACAUUACCUGGUA | CUCC GGAU CCCACA |
| 1370 | AUCCAC AGAA GCUU ACCAGAGAAACA X GUACAUUACCUGGUA | AAGC UGUC GUGGAU |
| 1562 | UCUCUG AGAA GGCC ACCAGAGAAACA X GUACAUUACCUGGUA | 00CC 00CC CAGAGA |
| 1576 | UUUAUG AGAA GGAU ACCAGAGAAACA X GUACAUUACCUGGUA | AUCC AGCU CAUAAA |
| 1596 | UGUGCC AGAA GCCA ACCAGAGAAACA X GUACAUUACCUGGUA | UGGC AGCU GGCACA |
| 1616 | GUUCAG AGAA GUCC ACCAGAGAAACA X GUACAUUACCUGGUA | GGAC UGCC CUGAAC |
| 1663 | GCCUAG AGAA GUGC ACCAGAGAAACA X GUACAUUACCUGGUA | GCAC UGUU CUACGC |
| 1692 | CUGGGC AGAA GGAC ACCAGAGAAACA X GUACAUUACCUGGUA | GUCC GGAU GCCCAG |
| 1713 | ACCUGC AGAA GGCC ACCAGAGAAACA X GUACAUUACCUGGUA | GGCC AGCU GCAGCU |
| 1719 | CGAUGG AGAA GCAG ACCAGAGAAACA X GUACAUUACCUGGUA | CUGC AGCU CCAUCG |
| 1797 | AAUGCC AGAA GUAA ACCAGAGAAACA X GUACAUUACCUGGUA | UUAC UGCU GGCAUU |
| 1863 | GGGUGA AGAA GUAC ACCAGAGAAACA X GUACAUUACCUGGUA | GUAC UGUU UCACCC |
| 1880 | CACUAC AGAA GGCC ACCAGAGAAACA X GUACAUUACCUGGUA | GGCC UGUU GUAGUG |
| 1898 | GGACCG AGAA GUCG ACCAGAGAAACA X GUACAUUACCUGGUA | CGAC CGAU CGGUCC |
| 1903 | GCACCG AGAA GAUC ACCAGAGAAACA X GUACAUUACCUGGUA | GAUC GGUC CGGUGC |
| 1943 | CAGCAC AGAA GUCU ACCAGAGAAACA X GUACAUUACCUGGUA | AGAC AGAU GUGCUG |
| 1951 | UUGAGA AGAA GCAC ACCAGAGAAACA X GUACAUUACCUGGUA | GUGC UGCU UCUCAA |
| 1969 | UGUGGC AGAA GCGU ACCAGAGAAACA X GUACAUUACCUGGUA | ACGC GGCC GCCACA |
| 2082 | CCGUGG AGAA GGUC ACCAGAGAAACA X GUACAUUACCUGGUA | GACC UGGC CCACGG |
| 2090 | AAAGCA AGAA GUGG ACCAGAGAAACA X GUACAUUACCUGGUA | CCAC GGAU UGCUUU |
| 2316 | GCUCCG AGAA GUCG ACCAGAGAAACA X GUACAUUACCUGGUA | GGAC AGAU CGGAGC |
| 2328 | GCAGCG AGAA GAGG ACCAGAGAAACA X GUACAUUACCUGGUA | GCUC AGGC CGCUGC |
| 2332 | AGCAGC AGAA GGCU ACCAGAGAAACA X GUACAUUACCUGGUA | AGCC CGCU GCUGCU |
| 2335 | GACAGG AGAA GCGG ACCAGAGAAACA X GUACAUUACCUGGUA | CGGC UGGU GGUGUC |
| 2338 | GUGGAC AGAA GCAG ACCAGAGAAACA X GUACAUUACCUGGUA | CUGC UGCU GUCCAC |
| 2341 | GUCGUG AGAA GCAG ACCAGAGAAACA X GUACAUUACCUGGUA | CUGC UGUC CACGAC |
| 2370 | UGAAGG AGAA GGGA ACCAGAGAAACA X GUACAUUACCUGGUA | UCCG UGUU CCUUCA |
| 2390 | GGACAG AGAA GGUA ACCAGAGAAACA X GUACAUUACCUGGUA | UACC GGCU CUGUGC |
| 2395 | CCAGUG AGAA GAGC ACCAGAGAAACA X GUACAUUACCUGGUA | GCUC UGUC CACUGG |
| 2465 | GGAGAC AGAA GCUG ACCAGAGAAACA X GUACAUUACCUGGUA | CAGC GGUU GUCUCC |
| 2522 | GCGCGC AGAA GCCA ACCAGAGAAACA X GUACAUUACCUGGUA | UGGC GGAC GCGCGC |
| 2541 | UCCACA AGAA GGCA ACCAGAGAAACA X GUACAUUACCUGGUA | UGGC UGCU UGUGGA |
| 2557 | GCUAUC AGAA GCAU ACCAGAGAAACA X GUACAUUACCUGGUA | AUGG UGCU GAUAGC |
| 2579 | CUCUAG AGAA GCCU ACCAGAGAAACA X GUACAUUACCUGGUA | AGGG CGCC CUAGAG |
| 2627 | AAUGCC AGAA GCUC ACCAGAGAAACA X GUACAUUACCUGGUA | GAGC GGAU GGCAUU |
| 2663 | GUACCA AGAA GCAC ACCAGAGAAACA X GUACAUUACCUGGUA | GUGC CGCC UGGUAC |
| 2725 | AGGAGC AGAA GGCA ACCAGAGAAACA X GUACAUUACCUGGUA | UGGC CGCU GCUCCU |
| 2728 | AGCAGG AGAA GCGG ACCAGAGAAACA X GUACAUUACCUGGUA | CCGC UGCU CCUGCU |
| 2734 | AGCAGG AGAA GGAG ACCAGAGAAACA X GUACAUUACCUGGUA | CUCC UGCU CCUGCU |
| 2740 | AACGCC AGAA GGAG ACCAGAGAAACA X GUACAUUACCUGGUA | CUCC UGCU GGCGUU |
| 2978 | UGGGUG AGAA GCAC ACCAGAGAAACA X GUACAUUACCUGGUA | GUGC GGCC CACCCA |
| 3016 | AUGGCG AGAA GGAG ACCAGAGAAACA X GUACAUUACCUGGUA | CUCC UGCU CGGCAU |
| 3030 | UGAGCG AGAA GAGA ACCAGAGAAACA X GUACAUUACCUGGUA | UCUC GGUC CGCUCA |
| 3034 | ACCAUG AGAA GACC ACCAGAGAAACA X GUACAUUACCUGGUA | GGUC CGCU CAUGGU |
| 3260 | GAAGAC AGAA GGCU ACCAGAGAAACA X GUACAUUACCUGGUA | AGCC CGUC GUCUUC |
| 3340 | GAGACG AGAA GUCG ACCAGAGAAACA X GUACAUUACCUGGUA | GGAC UGGC CGUCUC |
| 3344 | GGCGGA AGAA GGCA ACCAGAGAAACA X GUACAUUACCUGGUA | UGGC CGUC UCCGGC |
| 3350 | CCUUCG AGAA GAGA ACCAGAGAAACA X GUACAUUACCUGGUA | UCUC CGCC CGAAGG |
| 3383 | GCUAUC AGAA GGUC ACCAGAGAAACA X GUACAUUACCUGGUA | GACC GGCC GAUAGC |
| 3431 | GGCGUA AGAA GUGA ACCAGAGAAACA X GUACAUUACCUGGUA | UCAC GGCC UACGCC |
| 3581 | GUGGAA AGAA GUGC ACCAGAGAAACA X GUACAUUACCUGGUA | GGAC CGUC UUCCAC |
| 3597 | UCUUUG AGAA GGCG ACCAGAGAAACA X GUACAUUACCUGGUA | CGGC GGCU CAAAGA |
| 3615 | CUUUUG AGAA GGCU ACCAGAGAAACA X GUACAUUACCUGGUA | AGGC GGCC CAAAAG |
| 3669 | CAUGCC AGAA GACG ACCAGAGAAACA X GUACAUUACCUGGUA | CGUC GGCU GGCAUG |
| 3725 | AUAGAG AGAA GAGC ACCAGAGAAACA X GUACAUUACCUCGUA | CCUC GGAC CUCUAU |
| 3752 | AAUGAC AGAA GCAU ACCAGAGAAACA X GUACAUUACCUGGUA | AUGC UGAC GUCAUU |
| 3771 | CACCGC AGAA GGGG ACCAGAGAAACA X GUACAUUACCUGGUA | GCGC CGAC GCGGUG |
| 3783 | UCCCCC AGAA GUCA ACCAGAGAAACA X GUACAUUACCUGGUA | UGAC GGUC GGGGGA |
| 3799 | CUGGGG AGAA GUAG ACCAGAGAAACA X GUACAUUACCUGGUA | CUAC UGUC CCCCAG |
| 3807 | AGACGG AGAA GGGG ACCAGAGAAACA X GUACAUUACCUGGUA | CCCC AGAC CCGUCU |
| 3812 | AUAGGA AGAA GGUC ACCAGAGAAACA X GUACAUUACCUGGUA | GACC CGUC UCCUAU |
| 3847 | GGGCAG AGAA GUGG ACCAGAGAAACA X GUACAUUACCUGGUA | CCAC UGCU CUGCCC |
| 3852 | CCGAAG AGAA GAGC ACCAGAGAAACA X GUACAUUACCUGGUA | GCUC UGCC CUUCGG |
| 3887 | GCACAC AGAA GCCC ACCAGAGAAACA X GUACAUUACCUGGUA | GGGC UGCU GUGUGC |
| 3932 | AGACUC AGAA GGUA ACCAGAGAAACA X GUACAUUACCUGGUA | UACC CGUU GAGUCU |
| 3958 | ACCGGG AGAA GCAU ACCAGAGAAACA X GUACAUUACCUGGUA | AUGC GGUC CCCGGU |
| 3965 | CGUGAA AGAA GGGG ACCAGAGAAACA X GUACAUUACCUGGUA | CCCC GGUC UUCACG |
| 3992 | CGGUAC AGAA GGGG ACCAGAGAAACA X GUACAUUACCUGGUA | CCCC GGCC GUACCG |
| 4064 | GUACGC AGAA GGCA ACCAGAGAAACA X GUACAUUACCUGGUA | UGCC GGCU GCGUAC |
| 4076 | CCCUUG AGAA GCGU ACCAGAGAAACA X GUACAUUACCUGGUA | ACGC AGCC CAAGGG |
| 4112 | GGCGGC AGAA GAUG ACCAGAGAAACA X GUACAUUACCUGGUA | CAUC UGUU GCCGCC |
| 4163 | GUUGGG AGAA GUAC ACCAGAGAAACA X GUACAUUACCUGGUA | GUAC CGAC CCCAAC |
| 4244 | UCCACC AGAA GCAA ACCAGAGAAACA X GUACAUUACCUGGUA | UUGC CGAC GGUGGA |
| 4304 | AGUCGA AGAA GUUG ACCAGAGAAACA X GUACAUUACCUGGUA | CAAC UGAC UCGACU |
| 4334 | GUCCAG AGAA GUGC ACCAGAGAAACA X GUACAUUACCUGGUA | GCAC AGUC CUGGAC |
| 4355 | CGCUCC AGAA GUCU ACCAGAGAAACA X GUACAUUACCUGGUA | AGAC GGCU GGAGCG |
| 4366 | ACGACG AGAA GCGC ACCAGAGAAACA X GUACAUUACCUGGUA | GCGC GGCU CGUCGU |
| 4441 | GUGUUG AGAA GAGC ACCAGAGAAACA X GUACAUUACCUGGUA | GCUC UGUC CAACAC |
| 4621 | CCGCUA AGAA GUAU ACCAGAGAAACA X GUACAUUACCUGGUA | AUAC CGAC UAGCGG |
| 4652 | UAGAGC AGAA GUUG ACCAGAGAAACA X GUACAUUACCUGGUA | CAAC AGAC GCUCUA |
| 4724 | GAAAUC AGAA GUCU ACCAGAGAAACA X GUACAUUACCUGGUA | AGAC AGUC GAUUUC |
| 4734 | GAUCCA AGAA GAAA ACCAGAGAAACA X GUACAUUACCUGGUA | UUUC AGCU UGGAUC |
| 4861 | CCCGAG AGAA GUUC ACCAGAGAAACA X GUACAUUACCUGGUA | GAAC GGCC CUCGGG |
| 4886 | ACACAG AGAA GAAG ACCAGAGAAACA X GUACAUUACCUGGUA | CUUC GGUC CUGUGU |
| 4937 | AGUCUC AGAA GGCG ACCAGAGAAACA X GUACAUUACCUGGUA | CGGC CGCU GAGACU |
| 4988 | CUGGCA AGAA GGCA ACCAGAGAAACA X GUACAUUACCUGGUA | UGCC CGUC UGCCAG |
| 5059 | GUUUGG AGAA GGAA ACCAGAGAAACA X GUACAUUACCUGGUA | UUCC UGUC CCAAAC |
| 5179 | GGUUUA AGAA GUAU ACCAGAGAAACA X GUACAUUACCUGGUA | AUAC GGCU UAAACC |
| 5212 | CUAUAC AGAA GGGG ACCAGAGAAACA X GUACAUUACCUGGUA | CCCC UGCU GUAUAG |
| 5231 | AUUUUG AGAA GCUC ACCAGAGAAACA X GUACAUUACCUGGUA | GAGG CGUU CAAAAU |
| 5291 | CAGGUC AGAA GACA ACCAGAGAAACA X GUACAUUACCUGGUA | UGUC GGCC GACCUG |
| 5294 | CUCCAG AGAA GCCG ACCAGAGAAACA X GUACAUUACCUGGUA | CGGC CGAC CUGGAG |
| 5345 | GGCCAG AGAA GCAA ACCAGAGAAACA X GUACAUUACCUGGUA | UUGC AGCU CUGGCC |
| 5417 | AACAAC AGAA GGCC ACCAGAGAAACA X GUACAUUACCUGGUA | GGCC GGCU GUUGUU |
| 5420 | GGGAAC AGAA GCCG ACCAGAGAAACA X GUACAUUACCUGGUA | CGGC UGUU GUUCCC |
| 5509 | UCGGCG AGAA GCAU ACCAGAGAAACA X GUACAUUACCUGGUA | AUGC AGCU CGGCGA |
| 5521 | UGCUUG AGAA GCUC ACCAGAGAAACA X GUACAUUACCUGGUA | GAGC AGUU CAAGCA |
| 5576 | GGGAGC AGAA GGCU ACCAGAGAAACA X GUACAUUACCUGGUA | AGGC CGCU GCUCCC |
| 5579 | CACGGG AGAA GGGG ACCAGAGAAACA X GUACAUUACCUGGUA | CCGG UGCU CCCGUG |
| 5683 | UUCCCA AGAA GAGU ACCAGAGAAACA X GUACAUUACCUGGUA | ACUC UGCC UGGGAA |
| 5710 | AAUGCC AGAA GUGA ACCAGAGAAACA X GUACAUUACCUGGUA | UCAC UGAU GGCAUU |
| 5723 | GAUAGA AGAA GUGA ACCAGAGAAACA X GUACAUUACCUCGUA | UCAC AGCC UCUAUC |
| 5736 | UGAGCG AGAA GGUG ACCAGAGAAACA X GUACAUUACCUGGUA | CACC AGUC CGCUCA |
| 5740 | GUGGUG AGAA GACU ACCAGAGAAACA X GUACAUUACCUGGUA | AGUC CGCU CACCAC |
| 5764 | AUGUUG AGAA GGAG ACCAGAGAAACA X GUACAUUACCUGGUA | CUCC UGUU CAACAU |
| 5792 | GAGUUG AGAA GCCA ACCAGAGAAACA X GUACAUUACCUGGUA | UGGC UGCU CAACUC |
| 5816 | GGCCGA AGAA GCAC ACCAGAGAAACA X GUACAUUACCUGGUA | GUGC UGCU UCGGCC |
| 5822 | CACGAA AGAA GAAG ACCAGAGAAACA X GUACAUUACCUGGUA | CUUC GGCC UUCGUG |
| 5966 | GUCCUC AGAA GAGG ACCAGAGAAACA X GUACAUUACCUGGUA | CCUC CGCC GAGGAC |
| 6094 | GCUAUC AGAA GGUU ACCAGAGAAACA X GUACAUUACCUGGUA | AACC GGUU GAUAGC |
| 6178 | GAGAGG AGAA GAGU ACCAGAGAAACA X GUACAUUACCUGGUA | ACUC AGAU CCUCUC |
| 6189 | UGGUGA AGAA GGAG ACCAGAGAAACA X GUACAUUACCUGGUA | CUCC AGCC UCACCA |
| 6205 | UUCAGC AGAA GAGU ACCAGAGAAACA X GUACAUUACCUGGUA | ACUC AGCU GCUGAA |
| 6208 | CUCUUC AGAA GCUG ACCAGAGAAACA X GUACAUUACCUGGUA | CAGC UGCU GAAGAG |
| 6243 | GGGUGG AGAA GUCC ACCAGAGAAACA X GUACAUUACCUGGUA | GGAC UGCU CGACGC |
| 6261 | GCCACG AGAA GGAG ACCAGAGAAACA X GUACAUUACCUGGUA | CUCC GGCU CGUGGC |
| 6308 | CUUGAA AGAA GUCA ACCAGAGAAACA X GUACAUUACCUGGUA | UGAC UGAC UUCAAG |
| 6328 | AGCUUG AGAA GGAG ACCAGAGAAACA X GUACAUUACCUGGUA | CUCC AGUC CAAGCU |
| 6340 | AAUUUC AGAA GGAG ACCAGAGAAACA X GUACAUUACCUGGUA | CUCC UGCC GAAAUU |
| 6426 | CACAUG AGAA GGUG ACCAGAGAAACA X GUACAUUACCUGGUA | CACC UGCC CAUGUG |
| 6465 | UCAUGG AGAA GUUU ACCAGAGAAACA X GUACAUUACCUGGUA | AAAC GGUU CCAUGA |
| 6599 | CUCUUC AGAA GCCA ACCAGAGAAACA X GUACAUUACCUGGUA | UGGC UGCU GAAGAG |
| 6692 | UUCGGG AGAA GGGA ACCAGAGAAACA X GUACAUUACCUGGUA | UCCC GGCC CCCGAA |
| 6727 | CUGUGC AGAA GCAC ACCAGAGAAACA X GUACAUUACCUGGUA | GUGC GGUU GCACAG |
| 6753 | GGAGAG AGAA GCAC ACCAGAGAAACA X GUACAUUACCUGGUA | GUGC AGAC CUCUCC |
| 6817 | CAUGGG AGAA GUGA ACCAGAGAAACA X GUACAUUACCUGGUA | UCAC AGCU CCCAUG |
| 6839 | UGCCAC AGAA GGUU ACCAGAGAAACA X GUACAUUACCUGGUA | AACC GGAU GUGGCA |
| 6869 | GGAGGG AGAA GUGA ACCAGAGAAACA X GUACAUUACCUGGUA | UCAC CGAC CCCUCC |
| 6939 | CUGAAG AGAA GGCC ACCAGAGAAACA X GUACAUUACCUGGUA | GGCC AGCU CUUCAG |
| 7007 | GUCAGG AGAA GGGG ACCAGAGAAACA X GUACAUUACCUGGUA | CCCC GGAC GCUGAC |
| 7013 | GAUGAG AGAA GGGU ACCAGAGAAACA X GUACAUUACCUGGUA | ACGC UGAC CUCAUC |
| 7114 | GCUCGA AGAA GGUC ACCAGAGAAACA X GUACAUUACCUGGUA | GACC CGCU UCGAGC |
| 7148 | UGGUGC AGAA GAUA ACCAGAGAAACA X GUACAUUACCUGGUA | UAUC CGUU GCACCA |
| 7214 | GUUGUA AGAA GGGC ACCAGAGAAACA X GUACAUUACCUGGUA | GCCC GGAU UACAAC |
| 7253 | GACGUA AGAA GGAC ACCAGAGAAACA X GUACAUUACCUGGUA | GUCC GGAC UACGUC |
| 7291 | GUGGUA AGAA GCAA ACCAGAGAAACA X GUACAUUACCUGGUA | UUGC CGCC UACCAC |
| 7315 | CGUGGA AGAA GUAU ACCAGAGAAACA X GUACAUUACCUGGUA | AUAC CGCC UCCACG |
| 7337 | CAGAAC AGAA GUCC ACCAGAGAAACA X GUACAUUACCUGGUA | GGAC GGUU GUUCUG |
| 7367 | CGCCAA AGAA GAAG ACCAGAGAAACA X GUACAUUACCUGGUA | CUUC UGCC UUGGCG |
| 7401 | AUCCGG AGAA GCCG ACCAGAGAAACA X GUACAUUACCUGGUA | CGGC AGCU CCGGAU |
| 7407 | CCGACG AGAA GGAG ACCAGAGAAACA X GUACAUUACCUGGUA | CUCC GGAU CGUCGG |
| 7415 | GUCAAC AGAA GACG ACCAGAGAAACA X GUACAUUACCUGGUA | CGUC GGCC GUUGAC |
| 7418 | GGUGUC AGAA CCCG ACCAGAGAAACA X GUACAUUACCUGGUA | CGGC CGUU GACAGC |
| 7439 | GGGAGG AGAA GUCG ACCAGAGAAACA X GUACAUUACCUGGUA | CGAC CGGC CCUCCC |
| 7448 | GGUCUG AGAA GGAG ACCAGAGAAACA X GUACAUUACCUGGUA | CUCC CGAU CAGACC |
| 7453 | UCAGAG AGAA GAUC ACCAGAGAAACA X GUACAUUACCUGGUA | GAUC AGAC CUCUGA |
| 7460 | ACCGUC AGAA GAGG ACCAGAGAAACA X GUACAUUACCUGGUA | CCUC UGAC GACGGU |
| 7481 | CUCAAC AGAA GAUU ACCAGAGAAACA X GUACAUUACCUGGUA | AAUC UGAC GUUGAG |
| 7535 | GCUGAG AGAA GGGU ACCAGAGAAACA X GUACAUUACCUGGUA | ACCC UGAU CUCAGC |
| 7593 | UUGAGC AGAA GACG ACCAGAGAAACA X GUACAUUACCUGGUA | CGUC UGCU GCUCAA |
| 7596 | ACAUUG AGAA GCAG ACCAGAGAAACA X GUACAUUACCUGGUA | CUGC UGCU CAAUGU |
| 7627 | GGCGUG AGAA GGGC ACCAGAGAAACA X GUACAUUACCUGGUA | GCCC UGAU CACGCC |
| 7660 | UUGAUG AGAA GCUU ACCAGAGAAACA X GUACAUUACCUGGUA | AAGC UGCC CAUCAA |
| 7687 | UGACGC AGAA GAGA ACCAGAGAAACA X GUACAUUACCUGGUA | UCUC UGCU GCGUCA |
| 7764 | CUUGCA AGAA GUCA ACCAGAGAAACA X GUACAUUACCUGGUA | UGAC AGAC UGCAAG |
| 7870 | GGGGGC AGAA GCUU ACCAGAGAAACA X GUACAUUACCUGGUA | AAGC UGAC GCCCCC |
| 7956 | ACACGG AGAA GAUG ACCAGAGAAACA X GUACAUUACCUGGUA | CAUC CGCU CCGUGU |
| 7975 | UCUUCC AGAA GGUC ACCAGAGAAACA X GUACAUUACCUGGUA | GACC UGCU GGAAGA |
| 8066 | AAGGCG AGAA GGCU ACCAGAGAAACA X GUACAUUACCUGGUA | AGCC AGCU CGCCUU |
| 8087 | UCCCAG AGAA GGGA ACCAGAGAAACA X GUACAUUACCUGGUA | UCCC AGAC CUGGGA |
| 8172 | ACUGGA AGAA GUAC ACCAGAGAAACA X GUACAUUACCUGGUA | GUAC GGAU UCCAGU |
| 8262 | CAAAGC AGAA GGUG ACCAGAGAAACA X GUACAUUACCUGGUA | CACC CGCU GCUUUG |
| 8265 | AGUCAA AGAA GCGG ACCAGAGAAACA X GUACAUUACCUGGUA | CCGC UGCU UUGACU |
| 8374 | AUGUAG AGAA GCUC ACCAGAGAAACA X GUACAUUACCUGGUA | GAGC GGCU CUACAU |
| 8395 | GAAUUA AGAA GGGG ACCAGAGAAACA X GUACAUUACCUGGUA | CCCC UGAC UAAUUC |
| 8452 | CUAGUC AGAA GCAC ACCAGAGAAACA X GUACAUUACCUGGUA | GUGC UGAC GACUAG |
| 8501 | UCGACA AGAA GCAG ACCAGAGAAACA X GUACAUUACCUGGUA | CUGC GGCC UGUCGA |
| 8505 | CAGCUC AGAA GGCC ACCAGAGAAACA X GUACAUUACCUGGUA | GGCC UGUC GAGCUG |
| 8639 | GGGGGG AGAA GAGG ACCAGAGAAACA X GUACAUUACCUGGUA | ACUC UGCC CCCCCC |
| 8656 | GGUUGG AGAA GGUC ACCAGAGAAACA X GUACAUUACCUGGUA | GACC CGCC CCAACC |
| 8711 | GUGCGC AGAA GACA ACCAGAGAAACA X GUACAUUACCUGGUA | UGUC GGUC GCGCAC |
| 8911 | UUUUCA AGAA GUUC ACCAGAGAAACA X GUACAUUACCUGCUA | GAAC AGCU UGAAAA |
| 8935 | CCGUAG AGAA GACA ACCAGAGAAACA X GUACAUUACCUGGUA | UGUC AGAU CUACGG |
| 8980 | UGAAUG AGAA GAGG ACCAGAGAAACA X GUACAUUACCUGGUA | CCUC AGAU CAUUCA |
| 9082 | CGCAAG AGAA GUAC ACCAGAGAAACA X GUACAUUACCUGGUA | GUAC CGCC CUUGCG |
| 9133 | CCUUGG AGAA GUAG ACCAGAGAAACA X GUACAUUACCUGCUA | CUAC UGUC CCAAGG |
| 9218 | GGACGC AGAA GGGA ACCAGAGAAACA X GUACAUUACCUGGUA | UCCC GGCC GCGUCC |
| 9229 | AAGUCC AGAA GGGA ACCAGAGAAACA X GUACAUUACCUGGUA | UCCC AGCU GGACUU |
| 9243 | CGAACC AGAA GGAC ACCAGAGAAACA X GUACAUUACCUGGUA | GUCC AGCU GGUUCG |
| 9285 | GAGACA AGAA GUGA ACCAGAGAAACA X GUACAUUACCUGGUA | UCAC AGCC UGUCUC |
| 9289 | GCACGA AGAA GGCU ACCAGAGAAACA X GUACAUUACCUGGUA | AGCC UGUC UCGUGC |
| 9300 | AGCGGG AGAA GGCA ACCAGAGAAACA X GUACAUUACCUGGUA | UGCC CGAC CCCGCU |
| 9306 | UAAACC AGAA GGGU ACCAGAGAAACA X GUACAUUACCUGGUA | ACCC CGCU GGUUUA |
| 9358 | UUGGGG AGAA GGUA ACCAGAGAAACA X GUACAUUACCUGGUA | UACC UGCU CCCCAA |

Where “X” represents stem IV region of a HP ribozyme (Berzal-Herranz et al., 1993, EMBO.J. 12, 2567). The length of stem IV may be ≧2 base-pairs.

[0171] TABLE VIII

Additional HCV Conserved Hammerhead ribozyme and target sequence

| | | | | |
|---|---|---|---|---|
| Nos. | Name* | Pos.† | Ribozyme | Substrate |

| | | | | |
|---|---|---|---|---|
| 1 | HCV.C- 48 | 278 | UUGGUGU CUGAUGAG X CGAA ACGUUUG | CAAACGU A ACACCAA |
| 2 | HCV.C- 60 | 290 | UGUGGGC CUGAUGAG X CGAA ACGGUUG | CAACCGU C GCCCACA |
| 3 | HCV.C-175 | 405 | AGGUUGU CUGAUGAG X CGAA ACCGCUC | GAGCGGU C ACAACCU |
| 4 | HCV.3-118 | 9418 | AAAAAAA CUGAUGAG X CGAA AAAAAAA | UUUUUUU U UUUUUUU |
| 5 | HCV.3-145 | 9445 | UAAGAUG CUGAUGAG X CGAA AGCCACC | GGUGGCU C CAUCUUA |
| 6 | HCV.3-149 | 9449 | GGGCUAA CUGAUGAG X CGAA AUGGAGC | GCUCCAU C UUAGCCC |
| 7 | HCV.3-151 | 9451 | UAGGGCU CUGAUGAG X CGAA AGAUGGA | UCCAUCU U AGCCCUA |
| 8 | HCV.3-152 | 9452 | CUAGGGC CUGAUGAG X CGAA AAGAUGG | CCAUCUU A GCCCUAG |
| 9 | HCV.3-158 | 9458 | CCGUGAC CUGAUGAG X CGAA AGGGCUA | UAGCCCU A GUCACGG |
| 10 | HCV.3-161 | 9461 | UAGCCGU CUGAUGAG X CGAA ACUAGGG | CCCUAGU C ACGGCUA |
| 11 | HCV.3-168 | 9468 | UCACAGC CUGAUGAG X CGAA AGCCGUG | CACGGCU A GCUGUGA |
| 12 | HCV.3-181 | 9481 | GCUCACG CUGAUGAG X CGAA ACCUUUC | GAAAGGU C CGUGAGC |

Where “X” represents stem II region of a HH ribozyme (Hertel et al., 1992 Nucleic Acids Res. 20:3252). The length of stem II may be ≧2 base-pairs.
Core Reference Sequence for Nos. 1-3 = HPCCOPR (Acc#L38318) 1-600 bp
*Nucleotide 231 (8 nucleotide upstream of the initiator ATG) has been designated as “1” for the purpose of numbering ribozyme sites in the core protein coding region.
3′-NCR Reference Sequence for Nos. 4-12 = D85516 (Acc#D85516) 9301-9535 bp
*Nucleotide 9301 has been designated as “1” for the purpose of numbering ribozyme sites in the 3′NCR.
†position number reflects the reference sequence from HPCCOPR.

[0172] TABLE IX
Inhibition of HCV RNA in OST7 cells Using Mulitiple Ribozyme Motifs

| Motif | RPI Number | F_{Iuc}/R_{Iuc} | SEM | Sequence |
|---|---|---|---|---|
| RPI Motif I | Irrelevant Control | 0.22 | 0.03 | auccuUGAUₛGGCAUACACUAUGCGCGaugaucugcaB |
| RPI Motif I | 18738 | 0.13 | 0.03 | acacuuGAUₛggcauGcacuaugcgcgauacuaacgcB |
| RPI Motif I | 18739 | 0.15 | 0.01 | cacgauGAUₛggcauocacuaugcgcgacucauacUaB |
| RPI Motif I | 18740 | 0.15 | 0.01 | ggcuguGAUₛggcauGcacuaugcgcgacgacacucaB |
| RPI Motif I | 18746 | 0.10 | 0.02 | cccaauGAUₛggcauGcacuaugcgcgaCuaCUCggCB |
| RPI Motif I | 18747 | 0.16 | 0.02 | uuucguGAUₛggcauGcacuaugcgcggacccaaCaCB |
| RPI Motif I | 18750 | 0.15 | 0.03 | ucagguGAUₛggcauGcacuaugcgcgaguaccacaaB |
| RPI Motif I | 18754 | 0.12 | 0.01 | gcacuuGAUₛggcauGcacuaugcgcggcaagcacccB |
| RPI Motif II | SAC | 1.10 | 0.32 | aₛuₛuₛcₛca cUAGuGaggcguuagccGau Acgcga B |
| RPI Motif II | 20339 | 0.85 | 0.01 | uₛcₛcₛuₛcaccUGAuGaggccguuaggccGaaIgggaguB |
| RPI Motif II | 20350 | 1.04 | 0.05 | gₛuₛcₛcₛuggcUGAuGaggccguuaggccGaaIgcugcaB |
| RPI Motif III | Irrelevant Control | 1.28 | 0.07 | ggaaaggugugcaaCCGgaggaaacucCCUUCAAGGACAUCGUCCGGGacggcB |
| RPI Motif III | 18704 | 0.37 | 0.07 | uuccgcagaCGgaggaaacucCCUUCAAGGACGAAAGUCCGGGacuauggB |
| RPI Motif III | 18705 | 0.42 | 0.10 | ccgcagaCGgaggaaacucCCUUCAAGGACGAAAGUCCGGGacuauggB |
| RPI Motif III | 18700 | 0.61 | 0.16 | cagguaguaCGgaggaaacucCCUUCAAGGACAUCGUCCGGGacaaggB |
| RPI Motif III | 18701 | 0.54 | 0.10 | gcacggucUaGgaggaaacucCCUUCAAGGACAUCGUCCGGGgagaccB |
| RPI Motif III | 18835 | 0.54 | 0.04 | guguacucacGgaggaaacucCCUUCAAGGACAUCGUCCGGGgguucB |

Chemical Modifications are indicated as follows:
Lower case = 2′-O-Methyl
Bold (non-italicized): 2′-NH₂
U = 2′-C-Allyl-U
G, A = ribo G, A
s = phosphorothioate linkages
B = inverted abasic
I = ribo Inosine

1. An enzymatic nucleic acid molecule which specifically cleaves RNA derived from hepatitis C virus (HCV), wherein said enzymatic nucleic acid molecule is in a hammerhead motif, wherein the binding arms of said enzymatic nucleic acid molecule comprises sequences complementary to any of substrate sequences defmed in tables IV-VI and VIII.

2. An enzymatic nucleic acid molecule which specifically cleaves RNA derived from hepatitis C virus (HCV), wherein said enzymatic nucleic acid molecule is in a hairpin motif, wherein the binding arms of said enzymatic nucleic acid molecule comprises sequences complementary to any of substrate sequences defmed in table VII.

3. The enzymatic nucleic acid molecule of claim 1, wherein said enzymatic nucleic acid molecule comprises a stem II region of length greater than or equal to 2 base pairs.

4. The enzymatic nucleic acid molecule of claims 1 or 2, wherein said nucleic acid comprises between 12 and 100 bases complementary to said RNA.

5. The enzymatic nucleic acid molecule of claim 1 or 2, wherein said nucleic acid comprises between 14 and 24 bases complementary to said mRNA.

6. The enzymatic nucleic acid of claim 2, wherein said enzymatic nucleic acid molecule comprises a stem II region of length between three and seven base-pairs.

7. The enzymatic nucleic acid molecule of claim 2, wherein said enzymatic nucleic acid molecule consists essentially of any ribozyme sequence defined in Table VII.

8. The enzymatic nucleic acid molecule of claim 1, wherein said enzymatic nucleic acid molecule consists essentially of any ribozyme sequence defined in Tables IV-VI and VIII.

9. A pharmaceutical composition comprising the enzymatic nucleic acid molecule of claims 1 or 2.

10. A mammalian cell including an enzymatic nucleic acid molecule of any of claims 1 or 2.

11. The mammalian cell of claim 10, wherein said mammalian cell is a human cell.

12. An expression vector comprising nucleic acid sequence encoding at least one enzymatic nucleic acid molecule of claims 1 or 2, in a manner which allows expression of that enzymatic nucleic acid molecule.

13. A mammalian cell including an expression vector of claim 12.

14. The mammalian cell of claim 13, wherein said mammalian cell is a human cell.

15. A method for treatment of cirrhosis, liver failure or hepatocellular carcinoma comprising the step of administering to a patient the enzymatic nucleic acid molecule of claims 1 or 2 under conditions suitable for said treatment.

16. A method for treatment of cirrhosis, liver failure and/or hepatocellular carcinoma comprising the step of administering to a patient the expression vector of claims 1 or 2 under conditions suitable for said treatment.

17. A method of treatment of a patient having a condition associated with HCV infection, comprising contacting cells of said patient with the nucleic acid molecule of claims 1 or 2, and further comprising the use of one or more drug therapies under conditions suitable for said treatment.

18. The enzymatic nucleic acid molecule of claim 1, wherein said nucleic acid molecule comprises at least five ribose residues, and wherein said nucleic acid comprises phosphorothioate linkages at at least three of the 5′ terminal nucleotides, and wherein said nucleic acid comprises a 2′-C-allyl modification at position No. 4 of said nucleic acid, and wherein said nucleic acid comprises at least ten 2′-O-methyl modifications, and wherein said nucleic acid comprises a 3′-end modification.

19. The enzymatic nucleic acid of claim 18, wherein said nucleic acid comprises a 3′-3′ linked inverted abasic moiety at said 3′ end.

20. The enzymatic nucleic acid molecule of claim 1, wherein said nucleic acid molecule comprises at least five ribose residues, and wherein said nucleic acid molecule comprises phosphorothioate linkages at at least three of the 5′ terminal nucleotides, and wherein said nucleic acid comprises a 2′-amino modification at position No. 4 and/or at position No. 7 of said nucleic acid molecule, wherein said nucleic acid molecule comprises at least ten 2′-O-methyl modifications, and wherein said nucleic acid comprises a 3′-end modification.

21. The enzymatic nucleic acid molecule of claim 1, wherein said nucleic acid molecule comprises at least five ribose residues, and wherein said nucleic acid molecule comprises phosphorothioate linkages at at least three of the 5′ terminal nucleotides, and wherein said nucleic acid molecule comprises an abasic substitution at position No. 4 and/or at position No. 7 of said nucleic acid molecule, wherein said nucleic acid comprises at least ten 2′-O-methyl modifications, and wherein said nucleic acid molecule comprises a 3′-end modification.

22. The enzymatic nucleic acid molecule of claim 1, wherein said nucleic acid molecule comprises of at least five ribose residues, and wherein said nucleic acid comprises phosphorothioate linkages at at least three of the 5′ terminal nucleotides, and wherein said nucleic acid molecule comprises a 6-methyl uridine substitution at position No. 4 and/or at position No. 7 of said nucleic acid molecule, wherein said nucleic acid molecule comprises at least ten 2′-O-methyl modifications, and wherein said nucleic acid molecule comprises a 3′ end modification.

23. A method for inhibiting HCV replication in a mammalian cell comprising the step of administering to said cell the enzymatic nucleic acid molecule of claims 1 or 2 under conditions suitable for said inhibition.

24. A method of cleaving a separate RNA molecule comprising, contacting the enzymatic nucleic acid molecule of claims 1 or 2 with said separate RNA molecule under conditions suitable for the cleavage of said separate RNA molecule.

25. The method of claim 24, wherein said cleavage is carried out in the presence of a divalent cation.

26. The method of claim 25, wherein said divalent cation is Mg²⁺.

27. The nucleic acid molecule of claim 1 or 2, wherein said nucleic acid is chemically synthesized.

28. The expression vector of claim 12, wherein said vector comprises:
a) a transcription initiation region;
b) a transcription termination region;
c) a gene encoding at least one said nucleic acid molecule; and
wherein said gene is operably linked to said initiation region and said termination region, in a manner which allows expression and/or delivery of said nucleic acid molecule.

29. The expression vector of claim 12, wherein said vector comprises:
a) a transcription initiation region;
b) a transcription termination region;
c) an open reading frame;
d) a gene encoding at least one said nucleic acid molecule, wherein said gene is operably linked to the 3′-end of said open reading frame; and
wherein said gene is operably linked to said initiation region, said open reading frame and said termination region, in a manner which allows expression and/or delivery of said nucleic acid molecule.

30. The expression vector of claim 12, wherein said vector comprises:
a) a transcription initiation region;
b) a transcription termination region;
c) an intron;
d) a gene encoding at least one said nucleic acid molecule; and
wherein said gene is operably linked to said initiation region, said intron and said termination region, in a manner which allows expression and/or delivery of said nucleic acid molecule.

31. The expression vector of claim 12, wherein said vector comprises:
a) a transcription initiation region;
b) a transcription termination region;
c) an intron;
d) an open reading frame;
e) a gene encoding at least one said nucleic acid molecule, wherein said gene is operably linked to the 3′-end of said open reading frame; and wherein said gene is operably linked to said initiation region, said intron, said open reading frame and said termination region, in a manner which allows expression and/or delivery of said nucleic acid molecule.

32. An enzymatic nucleic acid molecule which specifically cleaves RNA derived from hepatitis C virus (HCV), wherein said enzymatic nucleic acid molecule is a DNA enzyme.

33. The enzymatic nucleic acid molecule of any of claims 1, 2 or 32, wherein said enzymatic nucleic acid comprises at least one 2′-sugar modification.

34. The enzymatic nucleic acid molecule of any of claims 1, 2 or 32, wherein said enzymatic nucleic acid comprises at least one nucleic acid base modification.

35. The enzymatic nucleic acid molecule of any of claims 1, 2 or 32, wherein said enzymatic nucleic acid comprises at least one phosphorothioate modification.

36. The method of claim 17, wherein said drug therapies is type I interferon.

37. The method of claim 36, wherein said type I interferon and the enzymatic nucleic acid molecule is administered simultaneously.

38. The method of claim 36, wherein said type I interferon and enzymatic nucleic acid molecule is administered separately.

39. The method of claim 36, wherein said type I interferon is interferon alpha.

40. The method of claim 36, wherein said type I interferon is interferon beta.

41. The method of claim 36, wherein said type I interferon is interferon gamma.

42. The method of claim 36, wherein said type I interferon is consensus interferon.

43. A method of treatment of a patient having a condition associated with HCV infection, comprising contacting cells of said patient with the nucleic acid molecule of claims 32, and further comprising the use of one or more drug therapies under conditions suitable for said treatment.

44. The method of claim 43, wherein said drug therapies is type I interferon.

45. The method of claim 44, wherein said type I interferon and the enzymatic nucleic acid molecule is administered simultaneously.

46. The method of claim 44, wherein said type I interferon and enzymatic nucleic acid molecule is administered separately.

47. The method of claim 44, wherein said type I interferon is interferon alpha.

48. The method of claim 44, wherein said type I interferon is interferon beta.

49. The method of claim 44, wherein said type I interferon is interferon gamma.

50. The method of claim 44, wherein said type I interferon is consensus interferon.

The application's sequence listing, which the Patent Office published only in electronic form, follows.

SEQUENCE LISTING (3148 sequences)

SEQ ID NO: 1 - RNA, 15 nt, Artificial Sequence
  Description of Artificial Sequence:  Nucleic Acid Target
cuacugucuucacgc

SEQ ID NO: 2 - RNA, 15 nt, Artificial Sequence
  Description of Artificial Sequence:  Nucleic Acid Target
aaagcgucuagccau

SEQ ID NO: 3 - RNA, 15 nt, Artificial Sequence
  Description of Artificial Sequence:  Nucleic Acid Target
agcgucuagccaugg

SEQ ID NO: 4 - RNA, 15 nt, Artificial Sequence
  Description of Artificial Sequence:  Nucleic Acid Target
ugagugucgugcagc

SEQ ID NO: 5 - RNA, 15 nt, Artificial Sequence
  Description of Artificial Sequence:  Nucleic Acid Target
gagccauaguggucu

SEQ ID NO: 6 - RNA, 15 nt, Artificial Sequence
  Description of Artificial Sequence:  Nucleic Acid Target
uaguggucugcggaa

SEQ ID NO: 7 - RNA, 15 nt, Artificial Sequence
  Description of Artificial Sequence:  Nucleic Acid Target
ggugaguacaccgga

SEQ ID NO: 8 - RNA, 15 nt, Artificial Sequence
  Description of Artificial Sequence:  Nucleic Acid Target
accggguccuuucuu

SEQ ID NO: 9 - RNA, 15 nt, Artificial Sequence
  Description of Artificial Sequence:  Nucleic Acid Target
ggguccuuucuugga

SEQ ID NO: 10 - RNA, 15 nt, Artificial Sequence
  Description of Artificial Sequence:  Nucleic Acid Target
gguccuuucuuggau

SEQ ID NO: 11 - RNA, 15 nt, Artificial Sequence
  Description of Artificial Sequence:  Nucleic Acid Target
guugggucgcgaaag

SEQ ID NO: 12 - RNA, 15 nt, Artificial Sequence
  Description of Artificial Sequence:  Nucleic Acid Target
aaggccuugugguac

SEQ ID NO: 13 - RNA, 15 nt, Artificial Sequence
  Description of Artificial Sequence:  Nucleic Acid Target
gggugcuugcgagug

SEQ ID NO: 14 - RNA, 15 nt, Artificial Sequence
  Description of Artificial Sequence:  Nucleic Acid Target
gggaggucucguaga

SEQ ID NO: 15 - RNA, 15 nt, Artificial Sequence
  Description of Artificial Sequence:  Nucleic Acid Target
gaggucucguagacc

SEQ ID NO: 16 - RNA, 15 nt, Artificial Sequence
  Description of Artificial Sequence:  Nucleic Acid Target
gucucguagaccgug

SEQ ID NO: 17 - RNA, 15 nt, Artificial Sequence
  Description of Artificial Sequence:  Nucleic Acid Target
uaaaccucaaagaaa

SEQ ID NO: 18 - RNA, 15 nt, Artificial Sequence
  Description of Artificial Sequence:  Nucleic Acid Target
caaacguaacaccaa

SEQ ID NO: 19 - RNA, 15 nt, Artificial Sequence
  Description of Artificial Sequence:  Nucleic Acid Target
caaccgucgcccaca

SEQ ID NO: 20 - RNA, 15 nt, Artificial Sequence
  Description of Artificial Sequence:  Nucleic Acid Target
gagcggucacaaccu

SEQ ID NO: 21 - RNA, 15 nt, Artificial Sequence
  Description of Artificial Sequence:  Nucleic Acid Target
guaaggucaucgaua

SEQ ID NO: 22 - RNA, 15 nt, Artificial Sequence
  Description of Artificial Sequence:  Nucleic Acid Target
uuuuuuuuuuuuuuu

SEQ ID NO: 23 - RNA, 15 nt, Artificial Sequence
  Description of Artificial Sequence:  Nucleic Acid Target
gguggcuccaucuua

SEQ ID NO: 24 - RNA, 15 nt, Artificial Sequence
  Description of Artificial Sequence:  Nucleic Acid Target
gcuccaucuuagccc

SEQ ID NO: 25 - RNA, 15 nt, Artificial Sequence
  Description of Artificial Sequence:  Nucleic Acid Target
uccaucuuagcccua

SEQ ID NO: 26 - RNA, 15 nt, Artificial Sequence
  Description of Artificial Sequence:  Nucleic Acid Target
ccaucuuagcccuag

SEQ ID NO: 27 - RNA, 15 nt, Artificial Sequence
  Description of Artificial Sequence:  Nucleic Acid Target
uagcccuagucacgg

SEQ ID NO: 28 - RNA, 15 nt, Artificial Sequence
  Description of Artificial Sequence:  Nucleic Acid Target
cccuagucacggcua

SEQ ID NO: 29 - RNA, 15 nt, Artificial Sequence
  Description of Artificial Sequence:  Nucleic Acid Target
cacggcuagcuguga

SEQ ID NO: 30 - RNA, 15 nt, Artificial Sequence
  Description of Artificial Sequence:  Nucleic Acid Target
gaaagguccgugagc

SEQ ID NO: 31 - RNA, 15 nt, Artificial Sequence
  Description of Artificial Sequence:  Nucleic Acid Target
cgacacuccaccaua

SEQ ID NO: 32 - RNA, 15 nt, Artificial Sequence
  Description of Artificial Sequence:  Nucleic Acid Target
gcagccuccaggacc

SEQ ID NO: 33 - RNA, 15 nt, Artificial Sequence
  Description of Artificial Sequence:  Nucleic Acid Target
ccccccucccgggag

SEQ ID NO: 34 - RNA, 15 nt, Artificial Sequence
  Description of Artificial Sequence:  Nucleic Acid Target
ccggaauugccagga

SEQ ID NO: 35 - RNA, 15 nt, Artificial Sequence
  Description of Artificial Sequence:  Nucleic Acid Target
ccuuucuuggaucaa

SEQ ID NO: 36 - RNA, 15 nt, Artificial Sequence
  Description of Artificial Sequence:  Nucleic Acid Target
acccgcucaaugccu

SEQ ID NO: 37 - RNA, 15 nt, Artificial Sequence
  Description of Artificial Sequence:  Nucleic Acid Target
gacugcuagccgagu

SEQ ID NO: 38 - RNA, 15 nt, Artificial Sequence
  Description of Artificial Sequence:  Nucleic Acid Target
gccgaguaguguugg

SEQ ID NO: 39 - RNA, 15 nt, Artificial Sequence
  Description of Artificial Sequence:  Nucleic Acid Target
guaguguugggucgc

SEQ ID NO: 40 - RNA, 15 nt, Artificial Sequence
  Description of Artificial Sequence:  Nucleic Acid Target
uugugguacugccug

SEQ ID NO: 41 - RNA, 15 nt, Artificial Sequence
  Description of Artificial Sequence:  Nucleic Acid Target
gccugauagggugcu

SEQ ID NO: 42 - RNA, 15 nt, Artificial Sequence
  Description of Artificial Sequence:  Nucleic Acid Target
aggacgucaaguucc

SEQ ID NO: 43 - RNA, 15 nt, Artificial Sequence
  Description of Artificial Sequence:  Nucleic Acid Target
gucaaguucccgggc

SEQ ID NO: 44 - RNA, 15 nt, Artificial Sequence
  Description of Artificial Sequence:  Nucleic Acid Target
ucaaguucccgggcg

SEQ ID NO: 45 - RNA, 15 nt, Artificial Sequence
  Description of Artificial Sequence:  Nucleic Acid Target
cgguggucagaucgu

SEQ ID NO: 46 - RNA, 15 nt, Artificial Sequence
  Description of Artificial Sequence:  Nucleic Acid Target
cccacguugggugug

SEQ ID NO: 47 - RNA, 15 nt, Artificial Sequence
  Description of Artificial Sequence:  Nucleic Acid Target
cgcgacuaggaagac

SEQ ID NO: 48 - RNA, 15 nt, Artificial Sequence
  Description of Artificial Sequence:  Nucleic Acid Target
gaagacuuccgaacg

SEQ ID NO: 49 - RNA, 15 nt, Artificial Sequence
  Description of Artificial Sequence:  Nucleic Acid Target
aagacuuccgaacgg

SEQ ID NO: 50 - RNA, 15 nt, Artificial Sequence
  Description of Artificial Sequence:  Nucleic Acid Target
gaacggucgcaaccu

SEQ ID NO: 51 - RNA, 15 nt, Artificial Sequence
  Description of Artificial Sequence:  Nucleic Acid Target
acaaccuauccccaa

SEQ ID NO: 52 - RNA, 15 nt, Artificial Sequence
  Description of Artificial Sequence:  Nucleic Acid Target
aaccuauccccaagg

SEQ ID NO: 53 - RNA, 15 nt, Artificial Sequence
  Description of Artificial Sequence:  Nucleic Acid Target
caaggcucgccgacc

SEQ ID NO: 54 - RNA, 15 nt, Artificial Sequence
  Description of Artificial Sequence:  Nucleic Acid Target
cgaggguagggccug

SEQ ID NO: 55 - RNA, 15 nt, Artificial Sequence
  Description of Artificial Sequence:  Nucleic Acid Target
cugggcucagccugg

SEQ ID NO: 56 - RNA, 15 nt, Artificial Sequence
  Description of Artificial Sequence:  Nucleic Acid Target
ccuggguacccuugg

SEQ ID NO: 57 - RNA, 15 nt, Artificial Sequence
  Description of Artificial Sequence:  Nucleic Acid Target
guacccuuggccccu

SEQ ID NO: 58 - RNA, 15 nt, Artificial Sequence
  Description of Artificial Sequence:  Nucleic Acid Target
ggccccucuauggca

SEQ ID NO: 59 - RNA, 15 nt, Artificial Sequence
  Description of Artificial Sequence:  Nucleic Acid Target
ccccucuauggcaau

SEQ ID NO: 60 - RNA, 15 nt, Artificial Sequence
  Description of Artificial Sequence:  Nucleic Acid Target
gauggcuccugucac

SEQ ID NO: 61 - RNA, 15 nt, Artificial Sequence
  Description of Artificial Sequence:  Nucleic Acid Target
cuccugucaccccgc

SEQ ID NO: 62 - RNA, 15 nt, Artificial Sequence
  Description of Artificial Sequence:  Nucleic Acid Target
cgcggcucccggccu

SEQ ID NO: 63 - RNA, 15 nt, Artificial Sequence
  Description of Artificial Sequence:  Nucleic Acid Target
ccggccuaguugggg

SEQ ID NO: 64 - RNA, 15 nt, Artificial Sequence
  Description of Artificial Sequence:  Nucleic Acid Target
gccuaguuggggccc

SEQ ID NO: 65 - RNA, 15 nt, Artificial Sequence
  Description of Artificial Sequence:  Nucleic Acid Target
gcgcaaucuggguaa

SEQ ID NO: 66 - RNA, 15 nt, Artificial Sequence
  Description of Artificial Sequence:  Nucleic Acid Target
aggucaucgauaccc

SEQ ID NO: 67 - RNA, 15 nt, Artificial Sequence
  Description of Artificial Sequence:  Nucleic Acid Target
caucgauacccucac

SEQ ID NO: 68 - RNA, 15 nt, Artificial Sequence
  Description of Artificial Sequence:  Nucleic Acid Target
ugcggcuucgccgac

SEQ ID NO: 69 - RNA, 15 nt, Artificial Sequence
  Description of Artificial Sequence:  Nucleic Acid Target
gcggcuucgccgacc

SEQ ID NO: 70 - RNA, 15 nt, Artificial Sequence
  Description of Artificial Sequence:  Nucleic Acid Target
augggguacauuccg

SEQ ID NO: 71 - RNA, 15 nt, Artificial Sequence
  Description of Artificial Sequence:  Nucleic Acid Target
gguacauuccgcucg

SEQ ID NO: 72 - RNA, 15 nt, Artificial Sequence
  Description of Artificial Sequence:  Nucleic Acid Target
guacauuccgcucgu

SEQ ID NO: 73 - RNA, 15 nt, Artificial Sequence
  Description of Artificial Sequence:  Nucleic Acid Target
uuccgcucgucggcg

SEQ ID NO: 74 - RNA, 15 nt, Artificial Sequence
  Description of Artificial Sequence:  Nucleic Acid Target
cgcucgucggcgccc

SEQ ID NO: 75 - RNA, 15 nt, Artificial Sequence
  Description of Artificial Sequence:  Nucleic Acid Target
ccccccuagggggcg

SEQ ID NO: 76 - RNA, 15 nt, Artificial Sequence
  Description of Artificial Sequence:  Nucleic Acid Target
augguguccggguuc

SEQ ID NO: 77 - RNA, 15 nt, Artificial Sequence
  Description of Artificial Sequence:  Nucleic Acid Target
uccggguucuggagg

SEQ ID NO: 78 - RNA, 15 nt, Artificial Sequence
  Description of Artificial Sequence:  Nucleic Acid Target
ccggguucuggagga

SEQ ID NO: 79 - RNA, 15 nt, Artificial Sequence
  Description of Artificial Sequence:  Nucleic Acid Target
gugaacuacgcaaca

SEQ ID NO: 80 - RNA, 15 nt, Artificial Sequence
  Description of Artificial Sequence:  Nucleic Acid Target
gggaacuugcccggu

SEQ ID NO: 81 - RNA, 15 nt, Artificial Sequence
  Description of Artificial Sequence:  Nucleic Acid Target
gcccgguugcucuuu

SEQ ID NO: 82 - RNA, 15 nt, Artificial Sequence
  Description of Artificial Sequence:  Nucleic Acid Target
gguugcucuuucucu

SEQ ID NO: 83 - RNA, 15 nt, Artificial Sequence
  Description of Artificial Sequence:  Nucleic Acid Target
auuguguaugaggca

SEQ ID NO: 84 - RNA, 15 nt, Artificial Sequence
  Description of Artificial Sequence:  Nucleic Acid Target
gcaugaucaugcaua

SEQ ID NO: 85 - RNA, 15 nt, Artificial Sequence
  Description of Artificial Sequence:  Nucleic Acid Target
ggugcguacccugcg

SEQ ID NO: 86 - RNA, 15 nt, Artificial Sequence
  Description of Artificial Sequence:  Nucleic Acid Target
ccugcguucgggaga

SEQ ID NO: 87 - RNA, 15 nt, Artificial Sequence
  Description of Artificial Sequence:  Nucleic Acid Target
cugcguucgggagaa

SEQ ID NO: 88 - RNA, 15 nt, Artificial Sequence
  Description of Artificial Sequence:  Nucleic Acid Target
aacgccucccguugu

SEQ ID NO: 89 - RNA, 15 nt, Artificial Sequence
  Description of Artificial Sequence:  Nucleic Acid Target
cucccguuguugggu

SEQ ID NO: 90 - RNA, 15 nt, Artificial Sequence
  Description of Artificial Sequence:  Nucleic Acid Target
ccguuguuggguagc

SEQ ID NO: 91 - RNA, 15 nt, Artificial Sequence
  Description of Artificial Sequence:  Nucleic Acid Target
guuggguagcgcuca

SEQ ID NO: 92 - RNA, 15 nt, Artificial Sequence
  Description of Artificial Sequence:  Nucleic Acid Target
gccacgucgacuugc

SEQ ID NO: 93 - RNA, 15 nt, Artificial Sequence
  Description of Artificial Sequence:  Nucleic Acid Target
gucgacuugcucguu

SEQ ID NO: 94 - RNA, 15 nt, Artificial Sequence
  Description of Artificial Sequence:  Nucleic Acid Target
acuugcucguugggg

SEQ ID NO: 95 - RNA, 15 nt, Artificial Sequence
  Description of Artificial Sequence:  Nucleic Acid Target
ugcucguuggggcgg

SEQ ID NO: 96 - RNA, 15 nt, Artificial Sequence
  Description of Artificial Sequence:  Nucleic Acid Target
gccgcuuucuguucc

SEQ ID NO: 97 - RNA, 15 nt, Artificial Sequence
  Description of Artificial Sequence:  Nucleic Acid Target
ccgcuuucuguuccg

SEQ ID NO: 98 - RNA, 15 nt, Artificial Sequence
  Description of Artificial Sequence:  Nucleic Acid Target
uuucuguuccgccau

SEQ ID NO: 99 - RNA, 15 nt, Artificial Sequence
  Description of Artificial Sequence:  Nucleic Acid Target
uucuguuccgccaug

SEQ ID NO: 100 - RNA, 15 nt, Artificial Sequence
  Description of Artificial Sequence:  Nucleic Acid Target
gccauguacgugggg

SEQ ID NO: 101 - RNA, 15 nt, Artificial Sequence
  Description of Artificial Sequence:  Nucleic Acid Target
ugcggauccguuuuc

SEQ ID NO: 102 - RNA, 15 nt, Artificial Sequence
  Description of Artificial Sequence:  Nucleic Acid Target
gauccguuuuccucg

SEQ ID NO: 103 - RNA, 15 nt, Artificial Sequence
  Description of Artificial Sequence:  Nucleic Acid Target
auccguuuuccucgu

SEQ ID NO: 104 - RNA, 15 nt, Artificial Sequence
  Description of Artificial Sequence:  Nucleic Acid Target
uccguuuuccucguc

SEQ ID NO: 105 - RNA, 15 nt, Artificial Sequence
  Description of Artificial Sequence:  Nucleic Acid Target
ccguuuuccucgucu

SEQ ID NO: 106 - RNA, 15 nt, Artificial Sequence
  Description of Artificial Sequence:  Nucleic Acid Target
gccauguaucagguc

SEQ ID NO: 107 - RNA, 15 nt, Artificial Sequence
  Description of Artificial Sequence:  Nucleic Acid Target
cauguaucaggucac

SEQ ID NO: 108 - RNA, 15 nt, Artificial Sequence
  Description of Artificial Sequence:  Nucleic Acid Target
aucaggucaccgcau

SEQ ID NO: 109 - RNA, 15 nt, Artificial Sequence
  Description of Artificial Sequence:  Nucleic Acid Target
aagcugucguggaua

SEQ ID NO: 110 - RNA, 15 nt, Artificial Sequence
  Description of Artificial Sequence:  Nucleic Acid Target
cguggauaugguggc

SEQ ID NO: 111 - RNA, 15 nt, Artificial Sequence
  Description of Artificial Sequence:  Nucleic Acid Target
ggggaguccuagcgg

SEQ ID NO: 112 - RNA, 15 nt, Artificial Sequence
  Description of Artificial Sequence:  Nucleic Acid Target
gaguccuagcgggcc

SEQ ID NO: 113 - RNA, 15 nt, Artificial Sequence
  Description of Artificial Sequence:  Nucleic Acid Target
cgggccuugccuacu

SEQ ID NO: 114 - RNA, 15 nt, Artificial Sequence
  Description of Artificial Sequence:  Nucleic Acid Target
cuugccuacuauucc

SEQ ID NO: 115 - RNA, 15 nt, Artificial Sequence
  Description of Artificial Sequence:  Nucleic Acid Target
gccuacuauuccaug

SEQ ID NO: 116 - RNA, 15 nt, Artificial Sequence
  Description of Artificial Sequence:  Nucleic Acid Target
cuacuauuccauggu

SEQ ID NO: 117 - RNA, 15 nt, Artificial Sequence
  Description of Artificial Sequence:  Nucleic Acid Target
uacuauuccauggug

SEQ ID NO: 118 - RNA, 15 nt, Artificial Sequence
  Description of Artificial Sequence:  Nucleic Acid Target
gcuccaucgacaagu

SEQ ID NO: 119 - RNA, 15 nt, Artificial Sequence
  Description of Artificial Sequence:  Nucleic Acid Target
gacaaguucgcucag

SEQ ID NO: 120 - RNA, 15 nt, Artificial Sequence
  Description of Artificial Sequence:  Nucleic Acid Target
acaaguucgcucagg

SEQ ID NO: 121 - RNA, 15 nt, Artificial Sequence
  Description of Artificial Sequence:  Nucleic Acid Target
guucgcucagggaug

SEQ ID NO: 122 - RNA, 15 nt, Artificial Sequence
  Description of Artificial Sequence:  Nucleic Acid Target
gccccaucaccuaua

SEQ ID NO: 123 - RNA, 15 nt, Artificial Sequence
  Description of Artificial Sequence:  Nucleic Acid Target
aucaccuauaccgag

SEQ ID NO: 124 - RNA, 15 nt, Artificial Sequence
  Description of Artificial Sequence:  Nucleic Acid Target
aggccuuacugcugg

SEQ ID NO: 125 - RNA, 15 nt, Artificial Sequence
  Description of Artificial Sequence:  Nucleic Acid Target
cuggcauuacgcacc

SEQ ID NO: 126 - RNA, 15 nt, Artificial Sequence
  Description of Artificial Sequence:  Nucleic Acid Target
uggcauuacgcaccu

SEQ ID NO: 127 - RNA, 15 nt, Artificial Sequence
  Description of Artificial Sequence:  Nucleic Acid Target
cgcaccucggcagug

SEQ ID NO: 128 - RNA, 15 nt, Artificial Sequence
  Description of Artificial Sequence:  Nucleic Acid Target
gugugguaucguacc

SEQ ID NO: 129 - RNA, 15 nt, Artificial Sequence
  Description of Artificial Sequence:  Nucleic Acid Target
gugguaucguaccug

SEQ ID NO: 130 - RNA, 15 nt, Artificial Sequence
  Description of Artificial Sequence:  Nucleic Acid Target
guaucguaccugcgu

SEQ ID NO: 131 - RNA, 15 nt, Artificial Sequence
  Description of Artificial Sequence:  Nucleic Acid Target
ccugcgucgcaggug

SEQ ID NO: 132 - RNA, 15 nt, Artificial Sequence
  Description of Artificial Sequence:  Nucleic Acid Target
gugugguccagugua

SEQ ID NO: 133 - RNA, 15 nt, Artificial Sequence
  Description of Artificial Sequence:  Nucleic Acid Target
gcccuguuguagugg

SEQ ID NO: 134 - RNA, 15 nt, Artificial Sequence
  Description of Artificial Sequence:  Nucleic Acid Target
cuguuguagugggga

SEQ ID NO: 135 - RNA, 15 nt, Artificial Sequence
  Description of Artificial Sequence:  Nucleic Acid Target
gaccgaucgguccgg

SEQ ID NO: 136 - RNA, 15 nt, Artificial Sequence
  Description of Artificial Sequence:  Nucleic Acid Target
gaucgguccggugcc

SEQ ID NO: 137 - RNA, 15 nt, Artificial Sequence
  Description of Artificial Sequence:  Nucleic Acid Target
ugccccuacguauaa

SEQ ID NO: 138 - RNA, 15 nt, Artificial Sequence
  Description of Artificial Sequence:  Nucleic Acid Target
ccuacguauaacugg

SEQ ID NO: 139 - RNA, 15 nt, Artificial Sequence
  Description of Artificial Sequence:  Nucleic Acid Target
uacguauaacugggg

SEQ ID NO: 140 - RNA, 15 nt, Artificial Sequence
  Description of Artificial Sequence:  Nucleic Acid Target
aacugguuuggcugu

SEQ ID NO: 141 - RNA, 15 nt, Artificial Sequence
  Description of Artificial Sequence:  Nucleic Acid Target
acugguuuggcugua

SEQ ID NO: 142 - RNA, 15 nt, Artificial Sequence
  Description of Artificial Sequence:  Nucleic Acid Target
uggcuguacauggau

SEQ ID NO: 143 - RNA, 15 nt, Artificial Sequence
  Description of Artificial Sequence:  Nucleic Acid Target
gggcccuccgugcaa

SEQ ID NO: 144 - RNA, 15 nt, Artificial Sequence
  Description of Artificial Sequence:  Nucleic Acid Target
gcaacaucggggggg

SEQ ID NO: 145 - RNA, 15 nt, Artificial Sequence
  Description of Artificial Sequence:  Nucleic Acid Target
ggggggucggcaacc

SEQ ID NO: 146 - RNA, 15 nt, Artificial Sequence
  Description of Artificial Sequence:  Nucleic Acid Target
gcaaccucaccuuga

SEQ ID NO: 147 - RNA, 15 nt, Artificial Sequence
  Description of Artificial Sequence:  Nucleic Acid Target
cucaccuugaccugc

SEQ ID NO: 148 - RNA, 15 nt, Artificial Sequence
  Description of Artificial Sequence:  Nucleic Acid Target
ggccacuuacacaaa

SEQ ID NO: 149 - RNA, 15 nt, Artificial Sequence
  Description of Artificial Sequence:  Nucleic Acid Target
gccacuuacacaaaa

SEQ ID NO: 150 - RNA, 15 nt, Artificial Sequence
  Description of Artificial Sequence:  Nucleic Acid Target
uguggcucggggcca

SEQ ID NO: 151 - RNA, 15 nt, Artificial Sequence
  Description of Artificial Sequence:  Nucleic Acid Target
ccaugguuaacaccu

SEQ ID NO: 152 - RNA, 15 nt, Artificial Sequence
  Description of Artificial Sequence:  Nucleic Acid Target
caugguuaacaccua

SEQ ID NO: 153 - RNA, 15 nt, Artificial Sequence
  Description of Artificial Sequence:  Nucleic Acid Target
uuaccaucuuuaagg

SEQ ID NO: 154 - RNA, 15 nt, Artificial Sequence
  Description of Artificial Sequence:  Nucleic Acid Target
accaucuuuaagguu

SEQ ID NO: 155 - RNA, 15 nt, Artificial Sequence
  Description of Artificial Sequence:  Nucleic Acid Target
acaggcuuagugcug

SEQ ID NO: 156 - RNA, 15 nt, Artificial Sequence
  Description of Artificial Sequence:  Nucleic Acid Target
caggcuuagugcugc

SEQ ID NO: 157 - RNA, 15 nt, Artificial Sequence
  Description of Artificial Sequence:  Nucleic Acid Target
agagcguugcgaccu

SEQ ID NO: 158 - RNA, 15 nt, Artificial Sequence
  Description of Artificial Sequence:  Nucleic Acid Target
gacagaucggagcuc

SEQ ID NO: 159 - RNA, 15 nt, Artificial Sequence
  Description of Artificial Sequence:  Nucleic Acid Target
cggagcucagcccgc

SEQ ID NO: 160 - RNA, 15 nt, Artificial Sequence
  Description of Artificial Sequence:  Nucleic Acid Target
cugcuguccacgaca

SEQ ID NO: 161 - RNA, 15 nt, Artificial Sequence
  Description of Artificial Sequence:  Nucleic Acid Target
uccaccuccaucaga

SEQ ID NO: 162 - RNA, 15 nt, Artificial Sequence
  Description of Artificial Sequence:  Nucleic Acid Target
ccuccaucagaacau

SEQ ID NO: 163 - RNA, 15 nt, Artificial Sequence
  Description of Artificial Sequence:  Nucleic Acid Target
agaacaucguggacg

SEQ ID NO: 164 - RNA, 15 nt, Artificial Sequence
  Description of Artificial Sequence:  Nucleic Acid Target
cgcgcgucugugccu

SEQ ID NO: 165 - RNA, 15 nt, Artificial Sequence
  Description of Artificial Sequence:  Nucleic Acid Target
ccgcccuagagaacc

SEQ ID NO: 166 - RNA, 15 nt, Artificial Sequence
  Description of Artificial Sequence:  Nucleic Acid Target
uggugguccucaacg

SEQ ID NO: 167 - RNA, 15 nt, Artificial Sequence
  Description of Artificial Sequence:  Nucleic Acid Target
ugguccucaacgcgg

SEQ ID NO: 168 - RNA, 15 nt, Artificial Sequence
  Description of Artificial Sequence:  Nucleic Acid Target
gccugguacaucaag

SEQ ID NO: 169 - RNA, 15 nt, Artificial Sequence
  Description of Artificial Sequence:  Nucleic Acid Target
gguacaucaagggca

SEQ ID NO: 170 - RNA, 15 nt, Artificial Sequence
  Description of Artificial Sequence:  Nucleic Acid Target
ggcuggucccugggg

SEQ ID NO: 171 - RNA, 15 nt, Artificial Sequence
  Description of Artificial Sequence:  Nucleic Acid Target
gcggcauaugcucug

SEQ ID NO: 172 - RNA, 15 nt, Artificial Sequence
  Description of Artificial Sequence:  Nucleic Acid Target
auaugcucuguacgg

SEQ ID NO: 173 - RNA, 15 nt, Artificial Sequence
  Description of Artificial Sequence:  Nucleic Acid Target
gcucuguacggcgug

SEQ ID NO: 174 - RNA, 15 nt, Artificial Sequence
  Description of Artificial Sequence:  Nucleic Acid Target
uccugcuccugcugg

SEQ ID NO: 175 - RNA, 15 nt, Artificial Sequence
  Description of Artificial Sequence:  Nucleic Acid Target
acgggcuuacgccau

SEQ ID NO: 176 - RNA, 15 nt, Artificial Sequence
  Description of Artificial Sequence:  Nucleic Acid Target
cgggcuuacgccaug

SEQ ID NO: 177 - RNA, 15 nt, Artificial Sequence
  Description of Artificial Sequence:  Nucleic Acid Target
uggugguuacaauac

SEQ ID NO: 178 - RNA, 15 nt, Artificial Sequence
  Description of Artificial Sequence:  Nucleic Acid Target
ggugguuacaauacu

SEQ ID NO: 179 - RNA, 15 nt, Artificial Sequence
  Description of Artificial Sequence:  Nucleic Acid Target
uuacaauacuuuauc

SEQ ID NO: 180 - RNA, 15 nt, Artificial Sequence
  Description of Artificial Sequence:  Nucleic Acid Target
caauacuuuaucacc

SEQ ID NO: 181 - RNA, 15 nt, Artificial Sequence
  Description of Artificial Sequence:  Nucleic Acid Target
aauacuuuaucacca

SEQ ID NO: 182 - RNA, 15 nt, Artificial Sequence
  Description of Artificial Sequence:  Nucleic Acid Target
ggcgcauuugugcgu

SEQ ID NO: 183 - RNA, 15 nt, Artificial Sequence
  Description of Artificial Sequence:  Nucleic Acid Target
gcgcauuugugcgug

SEQ ID NO: 184 - RNA, 15 nt, Artificial Sequence
  Description of Artificial Sequence:  Nucleic Acid Target
uguggguccccccuc

SEQ ID NO: 185 - RNA, 15 nt, Artificial Sequence
  Description of Artificial Sequence:  Nucleic Acid Target
ccccccucucaaugu

SEQ ID NO: 186 - RNA, 15 nt, Artificial Sequence
  Description of Artificial Sequence:  Nucleic Acid Target
ccccucucaaugucc

SEQ ID NO: 187 - RNA, 15 nt, Artificial Sequence
  Description of Artificial Sequence:  Nucleic Acid Target
ucaauguccgggggg

SEQ ID NO: 188 - RNA, 15 nt, Artificial Sequence
  Description of Artificial Sequence:  Nucleic Acid Target
cgaugcuaucauccu

SEQ ID NO: 189 - RNA, 15 nt, Artificial Sequence
  Description of Artificial Sequence:  Nucleic Acid Target
augcuaucauccucc

SEQ ID NO: 190 - RNA, 15 nt, Artificial Sequence
  Description of Artificial Sequence:  Nucleic Acid Target
cuaucauccuccuca

SEQ ID NO: 191 - RNA, 15 nt, Artificial Sequence
  Description of Artificial Sequence:  Nucleic Acid Target
ucauccuccucacau

SEQ ID NO: 192 - RNA, 15 nt, Artificial Sequence
  Description of Artificial Sequence:  Nucleic Acid Target
uccuccucacaugug

SEQ ID NO: 193 - RNA, 15 nt, Artificial Sequence
  Description of Artificial Sequence:  Nucleic Acid Target
cugccauaacugcga

SEQ ID NO: 194 - RNA, 15 nt, Artificial Sequence
  Description of Artificial Sequence:  Nucleic Acid Target
aggccauuacgucca

SEQ ID NO: 195 - RNA, 15 nt, Artificial Sequence
  Description of Artificial Sequence:  Nucleic Acid Target
ggccauuacguccaa

SEQ ID NO: 196 - RNA, 15 nt, Artificial Sequence
  Description of Artificial Sequence:  Nucleic Acid Target
auuacguccaaaugg

SEQ ID NO: 197 - RNA, 15 nt, Artificial Sequence
  Description of Artificial Sequence:  Nucleic Acid Target
auggccuucaugaag

SEQ ID NO: 198 - RNA, 15 nt, Artificial Sequence
  Description of Artificial Sequence:  Nucleic Acid Target
uggccuucaugaagc

SEQ ID NO: 199 - RNA, 15 nt, Artificial Sequence
  Description of Artificial Sequence:  Nucleic Acid Target
ccccgcuacaggauu

SEQ ID NO: 200 - RNA, 15 nt, Artificial Sequence
  Description of Artificial Sequence:  Nucleic Acid Target
acaggauugggccca

SEQ ID NO: 201 - RNA, 15 nt, Artificial Sequence
  Description of Artificial Sequence:  Nucleic Acid Target
cgggccuacgagacc

SEQ ID NO: 202 - RNA, 15 nt, Artificial Sequence
  Description of Artificial Sequence:  Nucleic Acid Target
gagaccuugcggugg

SEQ ID NO: 203 - RNA, 15 nt, Artificial Sequence
  Description of Artificial Sequence:  Nucleic Acid Target
agcccgucgucuucu

SEQ ID NO: 204 - RNA, 15 nt, Artificial Sequence
  Description of Artificial Sequence:  Nucleic Acid Target
ccgucgucuucucug

SEQ ID NO: 205 - RNA, 15 nt, Artificial Sequence
  Description of Artificial Sequence:  Nucleic Acid Target
gucgucuucucugac

SEQ ID NO: 206 - RNA, 15 nt, Artificial Sequence
  Description of Artificial Sequence:  Nucleic Acid Target
ccaagaucaucaccu

SEQ ID NO: 207 - RNA, 15 nt, Artificial Sequence
  Description of Artificial Sequence:  Nucleic Acid Target
agaucaucaccuggg

SEQ ID NO: 208 - RNA, 15 nt, Artificial Sequence
  Description of Artificial Sequence:  Nucleic Acid Target
gggacaucaucuugg

SEQ ID NO: 209 - RNA, 15 nt, Artificial Sequence
  Description of Artificial Sequence:  Nucleic Acid Target
acaucaucuugggac

SEQ ID NO: 210 - RNA, 15 nt, Artificial Sequence
  Description of Artificial Sequence:  Nucleic Acid Target
aucaucuugggacug

SEQ ID NO: 211 - RNA, 15 nt, Artificial Sequence
  Description of Artificial Sequence:  Nucleic Acid Target
ugcccgucuccgccc

SEQ ID NO: 212 - RNA, 15 nt, Artificial Sequence
  Description of Artificial Sequence:  Nucleic Acid Target
cccgucuccgcccga

SEQ ID NO: 213 - RNA, 15 nt, Artificial Sequence
  Description of Artificial Sequence:  Nucleic Acid Target
gggagauacuucugg

SEQ ID NO: 214 - RNA, 15 nt, Artificial Sequence
  Description of Artificial Sequence:  Nucleic Acid Target
ggcgacuccuugccc

SEQ ID NO: 215 - RNA, 15 nt, Artificial Sequence
  Description of Artificial Sequence:  Nucleic Acid Target
gacuccuugccccca

SEQ ID NO: 216 - RNA, 15 nt, Artificial Sequence
  Description of Artificial Sequence:  Nucleic Acid Target
cccccaucacggccu

SEQ ID NO: 217 - RNA, 15 nt, Artificial Sequence
  Description of Artificial Sequence:  Nucleic Acid Target
cuagccucacaggcc

SEQ ID NO: 218 - RNA, 15 nt, Artificial Sequence
  Description of Artificial Sequence:  Nucleic Acid Target
gggagguucaagugg

SEQ ID NO: 219 - RNA, 15 nt, Artificial Sequence
  Description of Artificial Sequence:  Nucleic Acid Target
ggagguucaaguggu

SEQ ID NO: 220 - RNA, 15 nt, Artificial Sequence
  Description of Artificial Sequence:  Nucleic Acid Target
aagugguuuccaccg

SEQ ID NO: 221 - RNA, 15 nt, Artificial Sequence
  Description of Artificial Sequence:  Nucleic Acid Target
agugguuuccaccgc

SEQ ID NO: 222 - RNA, 15 nt, Artificial Sequence
  Description of Artificial Sequence:  Nucleic Acid Target
gugguuuccaccgca

SEQ ID NO: 223 - RNA, 15 nt, Artificial Sequence
  Description of Artificial Sequence:  Nucleic Acid Target
uguguguuggaccgu

SEQ ID NO: 224 - RNA, 15 nt, Artificial Sequence
  Description of Artificial Sequence:  Nucleic Acid Target
gccggcucaaagacc

SEQ ID NO: 225 - RNA, 15 nt, Artificial Sequence
  Description of Artificial Sequence:  Nucleic Acid Target
agacccuagccggcc

SEQ ID NO: 226 - RNA, 15 nt, Artificial Sequence
  Description of Artificial Sequence:  Nucleic Acid Target
ugcgccucccggggc

SEQ ID NO: 227 - RNA, 15 nt, Artificial Sequence
  Description of Artificial Sequence:  Nucleic Acid Target
ggcgcguucccuuac

SEQ ID NO: 228 - RNA, 15 nt, Artificial Sequence
  Description of Artificial Sequence:  Nucleic Acid Target
gcgcguucccuuaca

SEQ ID NO: 229 - RNA, 15 nt, Artificial Sequence
  Description of Artificial Sequence:  Nucleic Acid Target
guucccuuacaccau

SEQ ID NO: 230 - RNA, 15 nt, Artificial Sequence
  Description of Artificial Sequence:  Nucleic Acid Target
uucccuuacaccaug

SEQ ID NO: 231 - RNA, 15 nt, Artificial Sequence
  Description of Artificial Sequence:  Nucleic Acid Target
gguagcucggaccuc

SEQ ID NO: 232 - RNA, 15 nt, Artificial Sequence
  Description of Artificial Sequence:  Nucleic Acid Target
cggaccucuaucugg

SEQ ID NO: 233 - RNA, 15 nt, Artificial Sequence
  Description of Artificial Sequence:  Nucleic Acid Target
gaccucuaucugguc

SEQ ID NO: 234 - RNA, 15 nt, Artificial Sequence
  Description of Artificial Sequence:  Nucleic Acid Target
ccucuaucuggucac

SEQ ID NO: 235 - RNA, 15 nt, Artificial Sequence
  Description of Artificial Sequence:  Nucleic Acid Target
aucuggucacgagac

SEQ ID NO: 236 - RNA, 15 nt, Artificial Sequence
  Description of Artificial Sequence:  Nucleic Acid Target
acgucauuccggugc

SEQ ID NO: 237 - RNA, 15 nt, Artificial Sequence
  Description of Artificial Sequence:  Nucleic Acid Target
cgucauuccggugcg

SEQ ID NO: 238 - RNA, 15 nt, Artificial Sequence
  Description of Artificial Sequence:  Nucleic Acid Target
ugacggucgggggag

SEQ ID NO: 239 - RNA, 15 nt, Artificial Sequence
  Description of Artificial Sequence:  Nucleic Acid Target
ggagccuacuguccc

SEQ ID NO: 240 - RNA, 15 nt, Artificial Sequence
  Description of Artificial Sequence:  Nucleic Acid Target
cuacugucccccaga

SEQ ID NO: 241 - RNA, 15 nt, Artificial Sequence
  Description of Artificial Sequence:  Nucleic Acid Target
ggcucuucggguggc

SEQ ID NO: 242 - RNA, 15 nt, Artificial Sequence
  Description of Artificial Sequence:  Nucleic Acid Target
cacugcucugcccuu

SEQ ID NO: 243 - RNA, 15 nt, Artificial Sequence
  Description of Artificial Sequence:  Nucleic Acid Target
cugcccuucggggca

SEQ ID NO: 244 - RNA, 15 nt, Artificial Sequence
  Description of Artificial Sequence:  Nucleic Acid Target
ugcccuucggggcac

SEQ ID NO: 245 - RNA, 15 nt, Artificial Sequence
  Description of Artificial Sequence:  Nucleic Acid Target
acgcuguaggcaucu

SEQ ID NO: 246 - RNA, 15 nt, Artificial Sequence
  Description of Artificial Sequence:  Nucleic Acid Target
uaggcaucuuccggg

SEQ ID NO: 247 - RNA, 15 nt, Artificial Sequence
  Description of Artificial Sequence:  Nucleic Acid Target
ggcaucuuccgggcu

SEQ ID NO: 248 - RNA, 15 nt, Artificial Sequence
  Description of Artificial Sequence:  Nucleic Acid Target
gcaucuuccgggcug

SEQ ID NO: 249 - RNA, 15 nt, Artificial Sequence
  Description of Artificial Sequence:  Nucleic Acid Target
gggggguugcgaagg

SEQ ID NO: 250 - RNA, 15 nt, Artificial Sequence
  Description of Artificial Sequence:  Nucleic Acid Target
gagcacuaaagugcc

SEQ ID NO: 251 - RNA, 15 nt, Artificial Sequence
  Description of Artificial Sequence:  Nucleic Acid Target
gcugcguacgcagcc

SEQ ID NO: 252 - RNA, 15 nt, Artificial Sequence
  Description of Artificial Sequence:  Nucleic Acid Target
caaggguacaaggua

SEQ ID NO: 253 - RNA, 15 nt, Artificial Sequence
  Description of Artificial Sequence:  Nucleic Acid Target
caucuguugccgcca

SEQ ID NO: 254 - RNA, 15 nt, Artificial Sequence
  Description of Artificial Sequence:  Nucleic Acid Target
ccaacaucagaacug

SEQ ID NO: 255 - RNA, 15 nt, Artificial Sequence
  Description of Artificial Sequence:  Nucleic Acid Target
cugggguaaggacca

SEQ ID NO: 256 - RNA, 15 nt, Artificial Sequence
  Description of Artificial Sequence:  Nucleic Acid Target
uccaccuaugguaag

SEQ ID NO: 257 - RNA, 15 nt, Artificial Sequence
  Description of Artificial Sequence:  Nucleic Acid Target
cuaugguaaguuccu

SEQ ID NO: 258 - RNA, 15 nt, Artificial Sequence
  Description of Artificial Sequence:  Nucleic Acid Target
gguaaguuccuugcc

SEQ ID NO: 259 - RNA, 15 nt, Artificial Sequence
  Description of Artificial Sequence:  Nucleic Acid Target
guaaguuccuugccg

SEQ ID NO: 260 - RNA, 15 nt, Artificial Sequence
  Description of Artificial Sequence:  Nucleic Acid Target
aguuccuugccgacg

SEQ ID NO: 261 - RNA, 15 nt, Artificial Sequence
  Description of Artificial Sequence:  Nucleic Acid Target
auaucauaauaugug

SEQ ID NO: 262 - RNA, 15 nt, Artificial Sequence
  Description of Artificial Sequence:  Nucleic Acid Target
ucauaauaugugaug

SEQ ID NO: 263 - RNA, 15 nt, Artificial Sequence
  Description of Artificial Sequence:  Nucleic Acid Target
gcacaguccuggacc

SEQ ID NO: 264 - RNA, 15 nt, Artificial Sequence
  Description of Artificial Sequence:  Nucleic Acid Target
cgcggcucgucgugc

SEQ ID NO: 265 - RNA, 15 nt, Artificial Sequence
  Description of Artificial Sequence:  Nucleic Acid Target
ggcucgucgugcucg

SEQ ID NO: 266 - RNA, 15 nt, Artificial Sequence
  Description of Artificial Sequence:  Nucleic Acid Target
ucgugcucgccaccg

SEQ ID NO: 267 - RNA, 15 nt, Artificial Sequence
  Description of Artificial Sequence:  Nucleic Acid Target
cccaaauauugagga

SEQ ID NO: 268 - RNA, 15 nt, Artificial Sequence
  Description of Artificial Sequence:  Nucleic Acid Target
gcucuguccaacacu

SEQ ID NO: 269 - RNA, 15 nt, Artificial Sequence
  Description of Artificial Sequence:  Nucleic Acid Target
gagagauccccuucu

SEQ ID NO: 270 - RNA, 15 nt, Artificial Sequence
  Description of Artificial Sequence:  Nucleic Acid Target
aggccaucccccucg

SEQ ID NO: 271 - RNA, 15 nt, Artificial Sequence
  Description of Artificial Sequence:  Nucleic Acid Target
ucccccucgaggcca

SEQ ID NO: 272 - RNA, 15 nt, Artificial Sequence
  Description of Artificial Sequence:  Nucleic Acid Target
aggccaucaaggggg

SEQ ID NO: 273 - RNA, 15 nt, Artificial Sequence
  Description of Artificial Sequence:  Nucleic Acid Target
ugccacuccaagaag

SEQ ID NO: 274 - RNA, 15 nt, Artificial Sequence
  Description of Artificial Sequence:  Nucleic Acid Target
ucggaaucaaugccg

SEQ ID NO: 275 - RNA, 15 nt, Artificial Sequence
  Description of Artificial Sequence:  Nucleic Acid Target
augccguagcguauu

SEQ ID NO: 276 - RNA, 15 nt, Artificial Sequence
  Description of Artificial Sequence:  Nucleic Acid Target
guagcguauuaccgg

SEQ ID NO: 277 - RNA, 15 nt, Artificial Sequence
  Description of Artificial Sequence:  Nucleic Acid Target
agcguauuaccgggg

SEQ ID NO: 278 - RNA, 15 nt, Artificial Sequence
  Description of Artificial Sequence:  Nucleic Acid Target
gcguauuaccggggu

SEQ ID NO: 279 - RNA, 15 nt, Artificial Sequence
  Description of Artificial Sequence:  Nucleic Acid Target
uguccgucauaccga

SEQ ID NO: 280 - RNA, 15 nt, Artificial Sequence
  Description of Artificial Sequence:  Nucleic Acid Target
ccgucauaccgacua

SEQ ID NO: 281 - RNA, 15 nt, Artificial Sequence
  Description of Artificial Sequence:  Nucleic Acid Target
accgacuagcggaga

SEQ ID NO: 282 - RNA, 15 nt, Artificial Sequence
  Description of Artificial Sequence:  Nucleic Acid Target
acgggcuacaccggu

SEQ ID NO: 283 - RNA, 15 nt, Artificial Sequence
  Description of Artificial Sequence:  Nucleic Acid Target
cggugaucgacugca

SEQ ID NO: 284 - RNA, 15 nt, Artificial Sequence
  Description of Artificial Sequence:  Nucleic Acid Target
gcggugucgcgcuca

SEQ ID NO: 285 - RNA, 15 nt, Artificial Sequence
  Description of Artificial Sequence:  Nucleic Acid Target
ucgcgcucacaacgg

SEQ ID NO: 286 - RNA, 15 nt, Artificial Sequence
  Description of Artificial Sequence:  Nucleic Acid Target
cugugcuugguauga

SEQ ID NO: 287 - RNA, 15 nt, Artificial Sequence
  Description of Artificial Sequence:  Nucleic Acid Target
gcuugguaugagcuc

SEQ ID NO: 288 - RNA, 15 nt, Artificial Sequence
  Description of Artificial Sequence:  Nucleic Acid Target
augagcucacgcccg

SEQ ID NO: 289 - RNA, 15 nt, Artificial Sequence
  Description of Artificial Sequence:  Nucleic Acid Target
ugagacuacagucag

SEQ ID NO: 290 - RNA, 15 nt, Artificial Sequence
  Description of Artificial Sequence:  Nucleic Acid Target
cuacagucagguugc

SEQ ID NO: 291 - RNA, 15 nt, Artificial Sequence
  Description of Artificial Sequence:  Nucleic Acid Target
gucagguugcgggcu

SEQ ID NO: 292 - RNA, 15 nt, Artificial Sequence
  Description of Artificial Sequence:  Nucleic Acid Target
gcgggcuuaccugaa

SEQ ID NO: 293 - RNA, 15 nt, Artificial Sequence
  Description of Artificial Sequence:  Nucleic Acid Target
cgggcuuaccugaau

SEQ ID NO: 294 - RNA, 15 nt, Artificial Sequence
  Description of Artificial Sequence:  Nucleic Acid Target
ccugaauacaccagg

SEQ ID NO: 295 - RNA, 15 nt, Artificial Sequence
  Description of Artificial Sequence:  Nucleic Acid Target
ccaggguugcccguc

SEQ ID NO: 296 - RNA, 15 nt, Artificial Sequence
  Description of Artificial Sequence:  Nucleic Acid Target
ugcccgucugccagg

SEQ ID NO: 297 - RNA, 15 nt, Artificial Sequence
  Description of Artificial Sequence:  Nucleic Acid Target
ggaccaucuggaguu

SEQ ID NO: 298 - RNA, 15 nt, Artificial Sequence
  Description of Artificial Sequence:  Nucleic Acid Target
accugguagcauacc

SEQ ID NO: 299 - RNA, 15 nt, Artificial Sequence
  Description of Artificial Sequence:  Nucleic Acid Target
guagcauaccaagcc

SEQ ID NO: 300 - RNA, 15 nt, Artificial Sequence
  Description of Artificial Sequence:  Nucleic Acid Target
cagggcucaggcucc

SEQ ID NO: 301 - RNA, 15 nt, Artificial Sequence
  Description of Artificial Sequence:  Nucleic Acid Target
cugcuguauaggcua

SEQ ID NO: 302 - RNA, 15 nt, Artificial Sequence
  Description of Artificial Sequence:  Nucleic Acid Target
gcuguauaggcuagg

SEQ ID NO: 303 - RNA, 15 nt, Artificial Sequence
  Description of Artificial Sequence:  Nucleic Acid Target
uggaggucgucacua

SEQ ID NO: 304 - RNA, 15 nt, Artificial Sequence
  Description of Artificial Sequence:  Nucleic Acid Target
aggucgucacuagca

SEQ ID NO: 305 - RNA, 15 nt, Artificial Sequence
  Description of Artificial Sequence:  Nucleic Acid Target
cgucacuagcaccug

SEQ ID NO: 306 - RNA, 15 nt, Artificial Sequence
  Description of Artificial Sequence:  Nucleic Acid Target
ugcugguaggcggag

SEQ ID NO: 307 - RNA, 15 nt, Artificial Sequence
  Description of Artificial Sequence:  Nucleic Acid Target
gcggaguccuugcag

SEQ ID NO: 308 - RNA, 15 nt, Artificial Sequence
  Description of Artificial Sequence:  Nucleic Acid Target
gaguccuugcagcuc

SEQ ID NO: 309 - RNA, 15 nt, Artificial Sequence
  Description of Artificial Sequence:  Nucleic Acid Target
gccgcauauugccug

SEQ ID NO: 310 - RNA, 15 nt, Artificial Sequence
  Description of Artificial Sequence:  Nucleic Acid Target
cgcauauugccugac

SEQ ID NO: 311 - RNA, 15 nt, Artificial Sequence
  Description of Artificial Sequence:  Nucleic Acid Target
aaccgguaguguggu

SEQ ID NO: 312 - RNA, 15 nt, Artificial Sequence
  Description of Artificial Sequence:  Nucleic Acid Target
guaggaucauuuugu

SEQ ID NO: 313 - RNA, 15 nt, Artificial Sequence
  Description of Artificial Sequence:  Nucleic Acid Target
cggcuguuguucccg

SEQ ID NO: 314 - RNA, 15 nt, Artificial Sequence
  Description of Artificial Sequence:  Nucleic Acid Target
cuguuguucccgaca

SEQ ID NO: 315 - RNA, 15 nt, Artificial Sequence
  Description of Artificial Sequence:  Nucleic Acid Target
uguuguucccgacag

SEQ ID NO: 316 - RNA, 15 nt, Artificial Sequence
  Description of Artificial Sequence:  Nucleic Acid Target
gagcaguucaagcag

SEQ ID NO: 317 - RNA, 15 nt, Artificial Sequence
  Description of Artificial Sequence:  Nucleic Acid Target
agcaguucaagcaga

SEQ ID NO: 318 - RNA, 15 nt, Artificial Sequence
  Description of Artificial Sequence:  Nucleic Acid Target
cgcugcucccguggu

SEQ ID NO: 319 - RNA, 15 nt, Artificial Sequence
  Description of Artificial Sequence:  Nucleic Acid Target
guggaguccaggugg

SEQ ID NO: 320 - RNA, 15 nt, Artificial Sequence
  Description of Artificial Sequence:  Nucleic Acid Target
gggcccuugaggccu

SEQ ID NO: 321 - RNA, 15 nt, Artificial Sequence
  Description of Artificial Sequence:  Nucleic Acid Target
gaggccuucugggca

SEQ ID NO: 322 - RNA, 15 nt, Artificial Sequence
  Description of Artificial Sequence:  Nucleic Acid Target
aggccuucugggcaa

SEQ ID NO: 323 - RNA, 15 nt, Artificial Sequence
  Description of Artificial Sequence:  Nucleic Acid Target
gcaggcuuauccacu

SEQ ID NO: 324 - RNA, 15 nt, Artificial Sequence
  Description of Artificial Sequence:  Nucleic Acid Target
caggcuuauccacuc

SEQ ID NO: 325 - RNA, 15 nt, Artificial Sequence
  Description of Artificial Sequence:  Nucleic Acid Target
cuccuguucaacauc

SEQ ID NO: 326 - RNA, 15 nt, Artificial Sequence
  Description of Artificial Sequence:  Nucleic Acid Target
uccuguucaacaucu

SEQ ID NO: 327 - RNA, 15 nt, Artificial Sequence
  Description of Artificial Sequence:  Nucleic Acid Target
cucaacucgcuccuc

SEQ ID NO: 328 - RNA, 15 nt, Artificial Sequence
  Description of Artificial Sequence:  Nucleic Acid Target
acucgcuccucccag

SEQ ID NO: 329 - RNA, 15 nt, Artificial Sequence
  Description of Artificial Sequence:  Nucleic Acid Target
gcugcuucggccuuc

SEQ ID NO: 330 - RNA, 15 nt, Artificial Sequence
  Description of Artificial Sequence:  Nucleic Acid Target
ucggccuucgugggc

SEQ ID NO: 331 - RNA, 15 nt, Artificial Sequence
  Description of Artificial Sequence:  Nucleic Acid Target
cggccuucgugggcg

SEQ ID NO: 332 - RNA, 15 nt, Artificial Sequence
  Description of Artificial Sequence:  Nucleic Acid Target
ccggcauugccggug

SEQ ID NO: 333 - RNA, 15 nt, Artificial Sequence
  Description of Artificial Sequence:  Nucleic Acid Target
cggccauuggcagca

SEQ ID NO: 334 - RNA, 15 nt, Artificial Sequence
  Description of Artificial Sequence:  Nucleic Acid Target
gcagcauaggccuug

SEQ ID NO: 335 - RNA, 15 nt, Artificial Sequence
  Description of Artificial Sequence:  Nucleic Acid Target
uaggccuugggaagg

SEQ ID NO: 336 - RNA, 15 nt, Artificial Sequence
  Description of Artificial Sequence:  Nucleic Acid Target
gcgggcuauggagcg

SEQ ID NO: 337 - RNA, 15 nt, Artificial Sequence
  Description of Artificial Sequence:  Nucleic Acid Target
gugcacucguggcuu

SEQ ID NO: 338 - RNA, 15 nt, Artificial Sequence
  Description of Artificial Sequence:  Nucleic Acid Target
cguggcuuuuaaggu

SEQ ID NO: 339 - RNA, 15 nt, Artificial Sequence
  Description of Artificial Sequence:  Nucleic Acid Target
guggcuuuuaagguc

SEQ ID NO: 340 - RNA, 15 nt, Artificial Sequence
  Description of Artificial Sequence:  Nucleic Acid Target
uggcuuuuaagguca

SEQ ID NO: 341 - RNA, 15 nt, Artificial Sequence
  Description of Artificial Sequence:  Nucleic Acid Target
ggcuuuuaaggucau

SEQ ID NO: 342 - RNA, 15 nt, Artificial Sequence
  Description of Artificial Sequence:  Nucleic Acid Target
uuaaggucaugagcg

SEQ ID NO: 343 - RNA, 15 nt, Artificial Sequence
  Description of Artificial Sequence:  Nucleic Acid Target
gcgcccuccgccgag

SEQ ID NO: 344 - RNA, 15 nt, Artificial Sequence
  Description of Artificial Sequence:  Nucleic Acid Target
accugguuaacuugc

SEQ ID NO: 345 - RNA, 15 nt, Artificial Sequence
  Description of Artificial Sequence:  Nucleic Acid Target
ccugguuaacuugcu

SEQ ID NO: 346 - RNA, 15 nt, Artificial Sequence
  Description of Artificial Sequence:  Nucleic Acid Target
acuugcucccugcca

SEQ ID NO: 347 - RNA, 15 nt, Artificial Sequence
  Description of Artificial Sequence:  Nucleic Acid Target
auccucucccccggc

SEQ ID NO: 348 - RNA, 15 nt, Artificial Sequence
  Description of Artificial Sequence:  Nucleic Acid Target
cccuggucgucgggg

SEQ ID NO: 349 - RNA, 15 nt, Artificial Sequence
  Description of Artificial Sequence:  Nucleic Acid Target
uggucgucggggucg

SEQ ID NO: 350 - RNA, 15 nt, Artificial Sequence
  Description of Artificial Sequence:  Nucleic Acid Target
ucggggucgugugug

SEQ ID NO: 351 - RNA, 15 nt, Artificial Sequence
  Description of Artificial Sequence:  Nucleic Acid Target
cagcaauccugcguc

SEQ ID NO: 352 - RNA, 15 nt, Artificial Sequence
  Description of Artificial Sequence:  Nucleic Acid Target
ccugcgucggcacgu

SEQ ID NO: 353 - RNA, 15 nt, Artificial Sequence
  Description of Artificial Sequence:  Nucleic Acid Target
auagcguucgcuucg

SEQ ID NO: 354 - RNA, 15 nt, Artificial Sequence
  Description of Artificial Sequence:  Nucleic Acid Target
uagcguucgcuucgc

SEQ ID NO: 355 - RNA, 15 nt, Artificial Sequence
  Description of Artificial Sequence:  Nucleic Acid Target
guucgcuucgcgggg

SEQ ID NO: 356 - RNA, 15 nt, Artificial Sequence
  Description of Artificial Sequence:  Nucleic Acid Target
acggcaucaugcaaa

SEQ ID NO: 357 - RNA, 15 nt, Artificial Sequence
  Description of Artificial Sequence:  Nucleic Acid Target
ccgaacuauuccagg

SEQ ID NO: 358 - RNA, 15 nt, Artificial Sequence
  Description of Artificial Sequence:  Nucleic Acid Target
gaacuauuccagggc

SEQ ID NO: 359 - RNA, 15 nt, Artificial Sequence
  Description of Artificial Sequence:  Nucleic Acid Target
aacuauuccagggcg

SEQ ID NO: 360 - RNA, 15 nt, Artificial Sequence
  Description of Artificial Sequence:  Nucleic Acid Target
ggggacuuccacuac

SEQ ID NO: 361 - RNA, 15 nt, Artificial Sequence
  Description of Artificial Sequence:  Nucleic Acid Target
gggacuuccacuacg

SEQ ID NO: 362 - RNA, 15 nt, Artificial Sequence
  Description of Artificial Sequence:  Nucleic Acid Target
uuccacuacgugacg

SEQ ID NO: 363 - RNA, 15 nt, Artificial Sequence
  Description of Artificial Sequence:  Nucleic Acid Target
acaacguaaaaugcc

SEQ ID NO: 364 - RNA, 15 nt, Artificial Sequence
  Description of Artificial Sequence:  Nucleic Acid Target
cccgaauucuucacc

SEQ ID NO: 365 - RNA, 15 nt, Artificial Sequence
  Description of Artificial Sequence:  Nucleic Acid Target
ccgaauucuucaccg

SEQ ID NO: 366 - RNA, 15 nt, Artificial Sequence
  Description of Artificial Sequence:  Nucleic Acid Target
gaauucuucaccgaa

SEQ ID NO: 367 - RNA, 15 nt, Artificial Sequence
  Description of Artificial Sequence:  Nucleic Acid Target
aauucuucaccgaau

SEQ ID NO: 368 - RNA, 15 nt, Artificial Sequence
  Description of Artificial Sequence:  Nucleic Acid Target
accgaauuggacggg

SEQ ID NO: 369 - RNA, 15 nt, Artificial Sequence
  Description of Artificial Sequence:  Nucleic Acid Target
gugcgguugcacagg

SEQ ID NO: 370 - RNA, 15 nt, Artificial Sequence
  Description of Artificial Sequence:  Nucleic Acid Target
cacagguacgcuccg

SEQ ID NO: 371 - RNA, 15 nt, Artificial Sequence
  Description of Artificial Sequence:  Nucleic Acid Target
guacgcuccggcgug

SEQ ID NO: 372 - RNA, 15 nt, Artificial Sequence
  Description of Artificial Sequence:  Nucleic Acid Target
cagaccucuccuacg

SEQ ID NO: 373 - RNA, 15 nt, Artificial Sequence
  Description of Artificial Sequence:  Nucleic Acid Target
gaccucuccuacggg

SEQ ID NO: 374 - RNA, 15 nt, Artificial Sequence
  Description of Artificial Sequence:  Nucleic Acid Target
cucuccuacgggagg

SEQ ID NO: 375 - RNA, 15 nt, Artificial Sequence
  Description of Artificial Sequence:  Nucleic Acid Target
aggaugucacauucc

SEQ ID NO: 376 - RNA, 15 nt, Artificial Sequence
  Description of Artificial Sequence:  Nucleic Acid Target
ucacauuccaggucg

SEQ ID NO: 377 - RNA, 15 nt, Artificial Sequence
  Description of Artificial Sequence:  Nucleic Acid Target
uccaggucgggcuca

SEQ ID NO: 378 - RNA, 15 nt, Artificial Sequence
  Description of Artificial Sequence:  Nucleic Acid Target
ucgggcucaaccaau

SEQ ID NO: 379 - RNA, 15 nt, Artificial Sequence
  Description of Artificial Sequence:  Nucleic Acid Target
aaccaauaccugguu

SEQ ID NO: 380 - RNA, 15 nt, Artificial Sequence
  Description of Artificial Sequence:  Nucleic Acid Target
accugguugggucac

SEQ ID NO: 381 - RNA, 15 nt, Artificial Sequence
  Description of Artificial Sequence:  Nucleic Acid Target
guugggucacagcuc

SEQ ID NO: 382 - RNA, 15 nt, Artificial Sequence
  Description of Artificial Sequence:  Nucleic Acid Target
cacagcucccaugcg

SEQ ID NO: 383 - RNA, 15 nt, Artificial Sequence
  Description of Artificial Sequence:  Nucleic Acid Target
uaaacguaggcuggc

SEQ ID NO: 384 - RNA, 15 nt, Artificial Sequence
  Description of Artificial Sequence:  Nucleic Acid Target
agggggucucccccc

SEQ ID NO: 385 - RNA, 15 nt, Artificial Sequence
  Description of Artificial Sequence:  Nucleic Acid Target
ggggucuccccccuc

SEQ ID NO: 386 - RNA, 15 nt, Artificial Sequence
  Description of Artificial Sequence:  Nucleic Acid Target
ccccccuccuuggcc

SEQ ID NO: 387 - RNA, 15 nt, Artificial Sequence
  Description of Artificial Sequence:  Nucleic Acid Target
cccuccuuggccagc

SEQ ID NO: 388 - RNA, 15 nt, Artificial Sequence
  Description of Artificial Sequence:  Nucleic Acid Target
gccagcucuucagcu

SEQ ID NO: 389 - RNA, 15 nt, Artificial Sequence
  Description of Artificial Sequence:  Nucleic Acid Target
agccaauugucugcg

SEQ ID NO: 390 - RNA, 15 nt, Artificial Sequence
  Description of Artificial Sequence:  Nucleic Acid Target
caauugucugcgccu

SEQ ID NO: 391 - RNA, 15 nt, Artificial Sequence
  Description of Artificial Sequence:  Nucleic Acid Target
ccaaccuccuguggc

SEQ ID NO: 392 - RNA, 15 nt, Artificial Sequence
  Description of Artificial Sequence:  Nucleic Acid Target
acccgcuucgagcgg

SEQ ID NO: 393 - RNA, 15 nt, Artificial Sequence
  Description of Artificial Sequence:  Nucleic Acid Target
cccgcuucgagcgga

SEQ ID NO: 394 - RNA, 15 nt, Artificial Sequence
  Description of Artificial Sequence:  Nucleic Acid Target
gggaaguauccguug

SEQ ID NO: 395 - RNA, 15 nt, Artificial Sequence
  Description of Artificial Sequence:  Nucleic Acid Target
cccgcguugcccaua

SEQ ID NO: 396 - RNA, 15 nt, Artificial Sequence
  Description of Artificial Sequence:  Nucleic Acid Target
ugcccauaugggcac

SEQ ID NO: 397 - RNA, 15 nt, Artificial Sequence
  Description of Artificial Sequence:  Nucleic Acid Target
cccggauuacaaccc

SEQ ID NO: 398 - RNA, 15 nt, Artificial Sequence
  Description of Artificial Sequence:  Nucleic Acid Target
ccggauuacaacccu

SEQ ID NO: 399 - RNA, 15 nt, Artificial Sequence
  Description of Artificial Sequence:  Nucleic Acid Target
ccacuguuagagucc

SEQ ID NO: 400 - RNA, 15 nt, Artificial Sequence
  Description of Artificial Sequence:  Nucleic Acid Target
cacuguuagaguccu

SEQ ID NO: 401 - RNA, 15 nt, Artificial Sequence
  Description of Artificial Sequence:  Nucleic Acid Target
gaaaaguccggacua

SEQ ID NO: 402 - RNA, 15 nt, Artificial Sequence
  Description of Artificial Sequence:  Nucleic Acid Target
ccggacuacgucccu

SEQ ID NO: 403 - RNA, 15 nt, Artificial Sequence
  Description of Artificial Sequence:  Nucleic Acid Target
acuacgucccuccgg

SEQ ID NO: 404 - RNA, 15 nt, Artificial Sequence
  Description of Artificial Sequence:  Nucleic Acid Target
cgucccuccggcggu

SEQ ID NO: 405 - RNA, 15 nt, Artificial Sequence
  Description of Artificial Sequence:  Nucleic Acid Target
ugcccauugccgccu

SEQ ID NO: 406 - RNA, 15 nt, Artificial Sequence
  Description of Artificial Sequence:  Nucleic Acid Target
gccgccuaccacggg

SEQ ID NO: 407 - RNA, 15 nt, Artificial Sequence
  Description of Artificial Sequence:  Nucleic Acid Target
acagaguccaccgug

SEQ ID NO: 408 - RNA, 15 nt, Artificial Sequence
  Description of Artificial Sequence:  Nucleic Acid Target
gcuggcuacuaagac

SEQ ID NO: 409 - RNA, 15 nt, Artificial Sequence
  Description of Artificial Sequence:  Nucleic Acid Target
ggcuacuaagacuuu

SEQ ID NO: 410 - RNA, 15 nt, Artificial Sequence
  Description of Artificial Sequence:  Nucleic Acid Target
uaagacuuucggcag

SEQ ID NO: 411 - RNA, 15 nt, Artificial Sequence
  Description of Artificial Sequence:  Nucleic Acid Target
aagacuuucggcagc

SEQ ID NO: 412 - RNA, 15 nt, Artificial Sequence
  Description of Artificial Sequence:  Nucleic Acid Target
agacuuucggcagcu

SEQ ID NO: 413 - RNA, 15 nt, Artificial Sequence
  Description of Artificial Sequence:  Nucleic Acid Target
uccggaucgucggcc

SEQ ID NO: 414 - RNA, 15 nt, Artificial Sequence
  Description of Artificial Sequence:  Nucleic Acid Target
ggaucgucggccguu

SEQ ID NO: 415 - RNA, 15 nt, Artificial Sequence
  Description of Artificial Sequence:  Nucleic Acid Target
cggccguugacagcg

SEQ ID NO: 416 - RNA, 15 nt, Artificial Sequence
  Description of Artificial Sequence:  Nucleic Acid Target
ucguacuccuccaug

SEQ ID NO: 417 - RNA, 15 nt, Artificial Sequence
  Description of Artificial Sequence:  Nucleic Acid Target
uacuccuccaugccc

SEQ ID NO: 418 - RNA, 15 nt, Artificial Sequence
  Description of Artificial Sequence:  Nucleic Acid Target
ccccccuugaggggg

SEQ ID NO: 419 - RNA, 15 nt, Artificial Sequence
  Description of Artificial Sequence:  Nucleic Acid Target
cccugaucucagcga

SEQ ID NO: 420 - RNA, 15 nt, Artificial Sequence
  Description of Artificial Sequence:  Nucleic Acid Target
cugaucucagcgacg

SEQ ID NO: 421 - RNA, 15 nt, Artificial Sequence
  Description of Artificial Sequence:  Nucleic Acid Target
gacgggucuuggucu

SEQ ID NO: 422 - RNA, 15 nt, Artificial Sequence
  Description of Artificial Sequence:  Nucleic Acid Target
cgggucuuggucuac

SEQ ID NO: 423 - RNA, 15 nt, Artificial Sequence
  Description of Artificial Sequence:  Nucleic Acid Target
ucuuggucuaccgug

SEQ ID NO: 424 - RNA, 15 nt, Artificial Sequence
  Description of Artificial Sequence:  Nucleic Acid Target
uuggucuaccgugag

SEQ ID NO: 425 - RNA, 15 nt, Artificial Sequence
  Description of Artificial Sequence:  Nucleic Acid Target
acgacaucgucugcu

SEQ ID NO: 426 - RNA, 15 nt, Artificial Sequence
  Description of Artificial Sequence:  Nucleic Acid Target
acaucgucugcugcu

SEQ ID NO: 427 - RNA, 15 nt, Artificial Sequence
  Description of Artificial Sequence:  Nucleic Acid Target
ugcugcucaaugucc

SEQ ID NO: 428 - RNA, 15 nt, Artificial Sequence
  Description of Artificial Sequence:  Nucleic Acid Target
ucaauguccuacaca

SEQ ID NO: 429 - RNA, 15 nt, Artificial Sequence
  Description of Artificial Sequence:  Nucleic Acid Target
ugcccaucaacgcgu

SEQ ID NO: 430 - RNA, 15 nt, Artificial Sequence
  Description of Artificial Sequence:  Nucleic Acid Target
acaacaucccgcagu

SEQ ID NO: 431 - RNA, 15 nt, Artificial Sequence
  Description of Artificial Sequence:  Nucleic Acid Target
ugcaaguccuggacg

SEQ ID NO: 432 - RNA, 15 nt, Artificial Sequence
  Description of Artificial Sequence:  Nucleic Acid Target
gaccacuaccgggac

SEQ ID NO: 433 - RNA, 15 nt, Artificial Sequence
  Description of Artificial Sequence:  Nucleic Acid Target
uaaggcuaaacuucu

SEQ ID NO: 434 - RNA, 15 nt, Artificial Sequence
  Description of Artificial Sequence:  Nucleic Acid Target
aacuucuauccguag

SEQ ID NO: 435 - RNA, 15 nt, Artificial Sequence
  Description of Artificial Sequence:  Nucleic Acid Target
cuucuauccguagaa

SEQ ID NO: 436 - RNA, 15 nt, Artificial Sequence
  Description of Artificial Sequence:  Nucleic Acid Target
uauccguagaagaag

SEQ ID NO: 437 - RNA, 15 nt, Artificial Sequence
  Description of Artificial Sequence:  Nucleic Acid Target
gccaaaucuaaauuu

SEQ ID NO: 438 - RNA, 15 nt, Artificial Sequence
  Description of Artificial Sequence:  Nucleic Acid Target
caaaucuaaauuugg

SEQ ID NO: 439 - RNA, 15 nt, Artificial Sequence
  Description of Artificial Sequence:  Nucleic Acid Target
ucuaaauuuggcuau

SEQ ID NO: 440 - RNA, 15 nt, Artificial Sequence
  Description of Artificial Sequence:  Nucleic Acid Target
cuaaauuuggcuaug

SEQ ID NO: 441 - RNA, 15 nt, Artificial Sequence
  Description of Artificial Sequence:  Nucleic Acid Target
uuuggcuauggggca

SEQ ID NO: 442 - RNA, 15 nt, Artificial Sequence
  Description of Artificial Sequence:  Nucleic Acid Target
accacauccgcuccg

SEQ ID NO: 443 - RNA, 15 nt, Artificial Sequence
  Description of Artificial Sequence:  Nucleic Acid Target
auccgcuccgugugg

SEQ ID NO: 444 - RNA, 15 nt, Artificial Sequence
  Description of Artificial Sequence:  Nucleic Acid Target
cucgccuuaucguau

SEQ ID NO: 445 - RNA, 15 nt, Artificial Sequence
  Description of Artificial Sequence:  Nucleic Acid Target
ucgccuuaucguauu

SEQ ID NO: 446 - RNA, 15 nt, Artificial Sequence
  Description of Artificial Sequence:  Nucleic Acid Target
gccuuaucguauucc

SEQ ID NO: 447 - RNA, 15 nt, Artificial Sequence
  Description of Artificial Sequence:  Nucleic Acid Target
uccucguacggauuc

SEQ ID NO: 448 - RNA, 15 nt, Artificial Sequence
  Description of Artificial Sequence:  Nucleic Acid Target
uacggauuccaguac

SEQ ID NO: 449 - RNA, 15 nt, Artificial Sequence
  Description of Artificial Sequence:  Nucleic Acid Target
uuccaguacucuccu

SEQ ID NO: 450 - RNA, 15 nt, Artificial Sequence
  Description of Artificial Sequence:  Nucleic Acid Target
guacucuccugggca

SEQ ID NO: 451 - RNA, 15 nt, Artificial Sequence
  Description of Artificial Sequence:  Nucleic Acid Target
agcggguugaguucc

SEQ ID NO: 452 - RNA, 15 nt, Artificial Sequence
  Description of Artificial Sequence:  Nucleic Acid Target
guugaguuccuggug

SEQ ID NO: 453 - RNA, 15 nt, Artificial Sequence
  Description of Artificial Sequence:  Nucleic Acid Target
uugaguuccugguga

SEQ ID NO: 454 - RNA, 15 nt, Artificial Sequence
  Description of Artificial Sequence:  Nucleic Acid Target
uggaaaucaaagaaa

SEQ ID NO: 455 - RNA, 15 nt, Artificial Sequence
  Description of Artificial Sequence:  Nucleic Acid Target
aggccauaaagucgc

SEQ ID NO: 456 - RNA, 15 nt, Artificial Sequence
  Description of Artificial Sequence:  Nucleic Acid Target
auaaagucgcucacg

SEQ ID NO: 457 - RNA, 15 nt, Artificial Sequence
  Description of Artificial Sequence:  Nucleic Acid Target
agucgcucacggagc

SEQ ID NO: 458 - RNA, 15 nt, Artificial Sequence
  Description of Artificial Sequence:  Nucleic Acid Target
agcggcucuacaucg

SEQ ID NO: 459 - RNA, 15 nt, Artificial Sequence
  Description of Artificial Sequence:  Nucleic Acid Target
cggcucuacaucggg

SEQ ID NO: 460 - RNA, 15 nt, Artificial Sequence
  Description of Artificial Sequence:  Nucleic Acid Target
ucuacaucgggggcc

SEQ ID NO: 461 - RNA, 15 nt, Artificial Sequence
  Description of Artificial Sequence:  Nucleic Acid Target
cugcgguuaucgccg

SEQ ID NO: 462 - RNA, 15 nt, Artificial Sequence
  Description of Artificial Sequence:  Nucleic Acid Target
ugcgguuaucgccgg

SEQ ID NO: 463 - RNA, 15 nt, Artificial Sequence
  Description of Artificial Sequence:  Nucleic Acid Target
cgguuaucgccggug

SEQ ID NO: 464 - RNA, 15 nt, Artificial Sequence
  Description of Artificial Sequence:  Nucleic Acid Target
gacgacuagcugcgg

SEQ ID NO: 465 - RNA, 15 nt, Artificial Sequence
  Description of Artificial Sequence:  Nucleic Acid Target
ggccugucgagcugc

SEQ ID NO: 466 - RNA, 15 nt, Artificial Sequence
  Description of Artificial Sequence:  Nucleic Acid Target
caaagcuccaggacu

SEQ ID NO: 467 - RNA, 15 nt, Artificial Sequence
  Description of Artificial Sequence:  Nucleic Acid Target
cgaugcucgugaacg

SEQ ID NO: 468 - RNA, 15 nt, Artificial Sequence
  Description of Artificial Sequence:  Nucleic Acid Target
acgaccuugucguua

SEQ ID NO: 469 - RNA, 15 nt, Artificial Sequence
  Description of Artificial Sequence:  Nucleic Acid Target
accuugucguuaucu

SEQ ID NO: 470 - RNA, 15 nt, Artificial Sequence
  Description of Artificial Sequence:  Nucleic Acid Target
uugucguuaucugug

SEQ ID NO: 471 - RNA, 15 nt, Artificial Sequence
  Description of Artificial Sequence:  Nucleic Acid Target
agguacucugccccc

SEQ ID NO: 472 - RNA, 15 nt, Artificial Sequence
  Description of Artificial Sequence:  Nucleic Acid Target
ccagaauacgacuug

SEQ ID NO: 473 - RNA, 15 nt, Artificial Sequence
  Description of Artificial Sequence:  Nucleic Acid Target
ucaugcuccuccaac

SEQ ID NO: 474 - RNA, 15 nt, Artificial Sequence
  Description of Artificial Sequence:  Nucleic Acid Target
ugcuccuccaacgug

SEQ ID NO: 475 - RNA, 15 nt, Artificial Sequence
  Description of Artificial Sequence:  Nucleic Acid Target
gacgcauccggcaaa

SEQ ID NO: 476 - RNA, 15 nt, Artificial Sequence
  Description of Artificial Sequence:  Nucleic Acid Target
ccccccuugcacggg

SEQ ID NO: 477 - RNA, 15 nt, Artificial Sequence
  Description of Artificial Sequence:  Nucleic Acid Target
aucauguaugcgccc

SEQ ID NO: 478 - RNA, 15 nt, Artificial Sequence
  Description of Artificial Sequence:  Nucleic Acid Target
cccaccuuaugggca

SEQ ID NO: 479 - RNA, 15 nt, Artificial Sequence
  Description of Artificial Sequence:  Nucleic Acid Target
ccaccuuaugggcaa

SEQ ID NO: 480 - RNA, 15 nt, Artificial Sequence
  Description of Artificial Sequence:  Nucleic Acid Target
gaugauuuugaugac

SEQ ID NO: 481 - RNA, 15 nt, Artificial Sequence
  Description of Artificial Sequence:  Nucleic Acid Target
gaugacucacuucuu

SEQ ID NO: 482 - RNA, 15 nt, Artificial Sequence
  Description of Artificial Sequence:  Nucleic Acid Target
ccuggauugucagau

SEQ ID NO: 483 - RNA, 15 nt, Artificial Sequence
  Description of Artificial Sequence:  Nucleic Acid Target
ggauugucagaucua

SEQ ID NO: 484 - RNA, 15 nt, Artificial Sequence
  Description of Artificial Sequence:  Nucleic Acid Target
gucagaucuacgggg

SEQ ID NO: 485 - RNA, 15 nt, Artificial Sequence
  Description of Artificial Sequence:  Nucleic Acid Target
cagaucuacggggcc

SEQ ID NO: 486 - RNA, 15 nt, Artificial Sequence
  Description of Artificial Sequence:  Nucleic Acid Target
caugccucaggaaac

SEQ ID NO: 487 - RNA, 15 nt, Artificial Sequence
  Description of Artificial Sequence:  Nucleic Acid Target
ggaaacuugggguac

SEQ ID NO: 488 - RNA, 15 nt, Artificial Sequence
  Description of Artificial Sequence:  Nucleic Acid Target
uugggguaccgcccu

SEQ ID NO: 489 - RNA, 15 nt, Artificial Sequence
  Description of Artificial Sequence:  Nucleic Acid Target
ccgcccuugcgaguc

SEQ ID NO: 490 - RNA, 15 nt, Artificial Sequence
  Description of Artificial Sequence:  Nucleic Acid Target
ugcgagucuggagac

SEQ ID NO: 491 - RNA, 15 nt, Artificial Sequence
  Description of Artificial Sequence:  Nucleic Acid Target
gaaguguccgcgcua

SEQ ID NO: 492 - RNA, 15 nt, Artificial Sequence
  Description of Artificial Sequence:  Nucleic Acid Target
ccgcgcuaggcuacu

SEQ ID NO: 493 - RNA, 15 nt, Artificial Sequence
  Description of Artificial Sequence:  Nucleic Acid Target
cuaggcuacuguccc

SEQ ID NO: 494 - RNA, 15 nt, Artificial Sequence
  Description of Artificial Sequence:  Nucleic Acid Target
cuacugucccaaggg

SEQ ID NO: 495 - RNA, 15 nt, Artificial Sequence
  Description of Artificial Sequence:  Nucleic Acid Target
gccgcgucccagcug

SEQ ID NO: 496 - RNA, 15 nt, Artificial Sequence
  Description of Artificial Sequence:  Nucleic Acid Target
cuggacuuguccagc

SEQ ID NO: 497 - RNA, 15 nt, Artificial Sequence
  Description of Artificial Sequence:  Nucleic Acid Target
gacuuguccagcugg

SEQ ID NO: 498 - RNA, 15 nt, Artificial Sequence
  Description of Artificial Sequence:  Nucleic Acid Target
agcugguucguugcu

SEQ ID NO: 499 - RNA, 15 nt, Artificial Sequence
  Description of Artificial Sequence:  Nucleic Acid Target
gcugguucguugcug

SEQ ID NO: 500 - RNA, 15 nt, Artificial Sequence
  Description of Artificial Sequence:  Nucleic Acid Target
gguucguugcugguu

SEQ ID NO: 501 - RNA, 15 nt, Artificial Sequence
  Description of Artificial Sequence:  Nucleic Acid Target
gagacauauaucaca

SEQ ID NO: 502 - RNA, 15 nt, Artificial Sequence
  Description of Artificial Sequence:  Nucleic Acid Target
gacauauaucacagc

SEQ ID NO: 503 - RNA, 15 nt, Artificial Sequence
  Description of Artificial Sequence:  Nucleic Acid Target
cauauaucacagccu

SEQ ID NO: 504 - RNA, 15 nt, Artificial Sequence
  Description of Artificial Sequence:  Nucleic Acid Target
agccugucucgugcc

SEQ ID NO: 505 - RNA, 15 nt, Artificial Sequence
  Description of Artificial Sequence:  Nucleic Acid Target
ggugccuacuccuac

SEQ ID NO: 506 - RNA, 15 nt, Artificial Sequence
  Description of Artificial Sequence:  Nucleic Acid Target
gccuacuccuacuuu

SEQ ID NO: 507 - RNA, 15 nt, Artificial Sequence
  Description of Artificial Sequence:  Nucleic Acid Target
uacuccuacuuuccg

SEQ ID NO: 508 - RNA, 15 nt, Artificial Sequence
  Description of Artificial Sequence:  Nucleic Acid Target
uccuacuuuccguag

SEQ ID NO: 509 - RNA, 15 nt, Artificial Sequence
  Description of Artificial Sequence:  Nucleic Acid Target
ccuacuuuccguagg

SEQ ID NO: 510 - RNA, 15 nt, Artificial Sequence
  Description of Artificial Sequence:  Nucleic Acid Target
cuacuuuccguaggg

SEQ ID NO: 511 - RNA, 15 nt, Artificial Sequence
  Description of Artificial Sequence:  Nucleic Acid Target
uuuccguagggguag

SEQ ID NO: 512 - RNA, 15 nt, Artificial Sequence
  Description of Artificial Sequence:  Nucleic Acid Target
uagggguaggcaucu

SEQ ID NO: 513 - RNA, 15 nt, Artificial Sequence
  Description of Artificial Sequence:  Nucleic Acid Target
uaggcaucuaccugc

SEQ ID NO: 514 - RNA, 15 nt, Artificial Sequence
  Description of Artificial Sequence:  Nucleic Acid Target
ggcaucuaccugcuc

SEQ ID NO: 515 - RNA, 15 nt, Artificial Sequence
  Description of Artificial Sequence:  Nucleic Acid Target
accugcuccccaacc

SEQ ID NO: 516 - RNA, 15 nt, Artificial Sequence
  Description of Artificial Sequence:  Nucleic Acid Target
gggagcuaaucacuc

SEQ ID NO: 517 - RNA, 15 nt, Artificial Sequence
  Description of Artificial Sequence:  Nucleic Acid Target
agcuaaucacuccag

SEQ ID NO: 518 - RNA, 15 nt, Artificial Sequence
  Description of Artificial Sequence:  Nucleic Acid Target
aaucacuccaggcca

SEQ ID NO: 519 - RNA, 15 nt, Artificial Sequence
  Description of Artificial Sequence:  Nucleic Acid Target
ggccaauaggccauc

SEQ ID NO: 520 - RNA, 15 nt, Artificial Sequence
  Description of Artificial Sequence:  Nucleic Acid Target
ccccgauugggggcg

SEQ ID NO: 521 - RNA, 15 nt, Artificial Sequence
  Description of Artificial Sequence:  Nucleic Acid Target
ccaccauagaucacu

SEQ ID NO: 522 - RNA, 15 nt, Artificial Sequence
  Description of Artificial Sequence:  Nucleic Acid Target
cauagaucacucccc

SEQ ID NO: 523 - RNA, 15 nt, Artificial Sequence
  Description of Artificial Sequence:  Nucleic Acid Target
gaucacuccccugug

SEQ ID NO: 524 - RNA, 15 nt, Artificial Sequence
  Description of Artificial Sequence:  Nucleic Acid Target
aggaacuacugucuu

SEQ ID NO: 525 - RNA, 15 nt, Artificial Sequence
  Description of Artificial Sequence:  Nucleic Acid Target
acugucuucacgcag

SEQ ID NO: 526 - RNA, 15 nt, Artificial Sequence
  Description of Artificial Sequence:  Nucleic Acid Target
cugucuucacgcaga

SEQ ID NO: 527 - RNA, 15 nt, Artificial Sequence
  Description of Artificial Sequence:  Nucleic Acid Target
auggcguuaguauga

SEQ ID NO: 528 - RNA, 15 nt, Artificial Sequence
  Description of Artificial Sequence:  Nucleic Acid Target
uggcguuaguaugag

SEQ ID NO: 529 - RNA, 15 nt, Artificial Sequence
  Description of Artificial Sequence:  Nucleic Acid Target
cguuaguaugagugu

SEQ ID NO: 530 - RNA, 15 nt, Artificial Sequence
  Description of Artificial Sequence:  Nucleic Acid Target
guccuuucuuggauc

SEQ ID NO: 531 - RNA, 15 nt, Artificial Sequence
  Description of Artificial Sequence:  Nucleic Acid Target
cuuggaucaacccgc

SEQ ID NO: 532 - RNA, 15 nt, Artificial Sequence
  Description of Artificial Sequence:  Nucleic Acid Target
uggagauuugggcgu

SEQ ID NO: 533 - RNA, 15 nt, Artificial Sequence
  Description of Artificial Sequence:  Nucleic Acid Target
ggagauuugggcgug

SEQ ID NO: 534 - RNA, 15 nt, Artificial Sequence
  Description of Artificial Sequence:  Nucleic Acid Target
cacgaauccuaaacc

SEQ ID NO: 535 - RNA, 15 nt, Artificial Sequence
  Description of Artificial Sequence:  Nucleic Acid Target
gaauccuaaaccuca

SEQ ID NO: 536 - RNA, 15 nt, Artificial Sequence
  Description of Artificial Sequence:  Nucleic Acid Target
caaacguaacaccua

SEQ ID NO: 537 - RNA, 15 nt, Artificial Sequence
  Description of Artificial Sequence:  Nucleic Acid Target
aacaccuaccgccgc

SEQ ID NO: 538 - RNA, 15 nt, Artificial Sequence
  Description of Artificial Sequence:  Nucleic Acid Target
gucagaucguuggug

SEQ ID NO: 539 - RNA, 15 nt, Artificial Sequence
  Description of Artificial Sequence:  Nucleic Acid Target
agaucguugguggag

SEQ ID NO: 540 - RNA, 15 nt, Artificial Sequence
  Description of Artificial Sequence:  Nucleic Acid Target
guggaguuuacgugu

SEQ ID NO: 541 - RNA, 15 nt, Artificial Sequence
  Description of Artificial Sequence:  Nucleic Acid Target
uggaguuuacguguu

SEQ ID NO: 542 - RNA, 15 nt, Artificial Sequence
  Description of Artificial Sequence:  Nucleic Acid Target
ggaguuuacguguug

SEQ ID NO: 543 - RNA, 15 nt, Artificial Sequence
  Description of Artificial Sequence:  Nucleic Acid Target
uacguguugccgcgc

SEQ ID NO: 544 - RNA, 15 nt, Artificial Sequence
  Description of Artificial Sequence:  Nucleic Acid Target
gcaaccucguggaag

SEQ ID NO: 545 - RNA, 15 nt, Artificial Sequence
  Description of Artificial Sequence:  Nucleic Acid Target
cggaggucgcgcaau

SEQ ID NO: 546 - RNA, 15 nt, Artificial Sequence
  Description of Artificial Sequence:  Nucleic Acid Target
ucuggguaaggucau

SEQ ID NO: 547 - RNA, 15 nt, Artificial Sequence
  Description of Artificial Sequence:  Nucleic Acid Target
auacccucacgugcg

SEQ ID NO: 548 - RNA, 15 nt, Artificial Sequence
  Description of Artificial Sequence:  Nucleic Acid Target
ccgaccucauggggu

SEQ ID NO: 549 - RNA, 15 nt, Artificial Sequence
  Description of Artificial Sequence:  Nucleic Acid Target
uugcucuuucucuau

SEQ ID NO: 550 - RNA, 15 nt, Artificial Sequence
  Description of Artificial Sequence:  Nucleic Acid Target
ugcucuuucucuauc

SEQ ID NO: 551 - RNA, 15 nt, Artificial Sequence
  Description of Artificial Sequence:  Nucleic Acid Target
gcucuuucucuaucu

SEQ ID NO: 552 - RNA, 15 nt, Artificial Sequence
  Description of Artificial Sequence:  Nucleic Acid Target
ucuuucucuaucuuc

SEQ ID NO: 553 - RNA, 15 nt, Artificial Sequence
  Description of Artificial Sequence:  Nucleic Acid Target
uuucucuaucuuccu

SEQ ID NO: 554 - RNA, 15 nt, Artificial Sequence
  Description of Artificial Sequence:  Nucleic Acid Target
ucucuaucuuccucu

SEQ ID NO: 555 - RNA, 15 nt, Artificial Sequence
  Description of Artificial Sequence:  Nucleic Acid Target
ucuaucuuccucuug

SEQ ID NO: 556 - RNA, 15 nt, Artificial Sequence
  Description of Artificial Sequence:  Nucleic Acid Target
cuaucuuccucuugg

SEQ ID NO: 557 - RNA, 15 nt, Artificial Sequence
  Description of Artificial Sequence:  Nucleic Acid Target
ucuuccucuuggccc

SEQ ID NO: 558 - RNA, 15 nt, Artificial Sequence
  Description of Artificial Sequence:  Nucleic Acid Target
uuccucuuggcccug

SEQ ID NO: 559 - RNA, 15 nt, Artificial Sequence
  Description of Artificial Sequence:  Nucleic Acid Target
cugcuguccuguuug

SEQ ID NO: 560 - RNA, 15 nt, Artificial Sequence
  Description of Artificial Sequence:  Nucleic Acid Target
guccuguuugaccau

SEQ ID NO: 561 - RNA, 15 nt, Artificial Sequence
  Description of Artificial Sequence:  Nucleic Acid Target
uccuguuugaccauc

SEQ ID NO: 562 - RNA, 15 nt, Artificial Sequence
  Description of Artificial Sequence:  Nucleic Acid Target
ugaccaucccagcuu

SEQ ID NO: 563 - RNA, 15 nt, Artificial Sequence
  Description of Artificial Sequence:  Nucleic Acid Target
cccagcuuccgcuua

SEQ ID NO: 564 - RNA, 15 nt, Artificial Sequence
  Description of Artificial Sequence:  Nucleic Acid Target
ccagcuuccgcuuau

SEQ ID NO: 565 - RNA, 15 nt, Artificial Sequence
  Description of Artificial Sequence:  Nucleic Acid Target
uuccgcuuaucaggu

SEQ ID NO: 566 - RNA, 15 nt, Artificial Sequence
  Description of Artificial Sequence:  Nucleic Acid Target
uccgcuuaucaggug

SEQ ID NO: 567 - RNA, 15 nt, Artificial Sequence
  Description of Artificial Sequence:  Nucleic Acid Target
cgcuuaucaggugcg

SEQ ID NO: 568 - RNA, 15 nt, Artificial Sequence
  Description of Artificial Sequence:  Nucleic Acid Target
aacgcauccgggcug

SEQ ID NO: 569 - RNA, 15 nt, Artificial Sequence
  Description of Artificial Sequence:  Nucleic Acid Target
gggcuguaccauguc

SEQ ID NO: 570 - RNA, 15 nt, Artificial Sequence
  Description of Artificial Sequence:  Nucleic Acid Target
accaugucacgaaug

SEQ ID NO: 571 - RNA, 15 nt, Artificial Sequence
  Description of Artificial Sequence:  Nucleic Acid Target
gacugcuccaacuca

SEQ ID NO: 572 - RNA, 15 nt, Artificial Sequence
  Description of Artificial Sequence:  Nucleic Acid Target
uccaacucaagcauu

SEQ ID NO: 573 - RNA, 15 nt, Artificial Sequence
  Description of Artificial Sequence:  Nucleic Acid Target
caagcauuguguaug

SEQ ID NO: 574 - RNA, 15 nt, Artificial Sequence
  Description of Artificial Sequence:  Nucleic Acid Target
caugcauacccccgg

SEQ ID NO: 575 - RNA, 15 nt, Artificial Sequence
  Description of Artificial Sequence:  Nucleic Acid Target
uagcgcucacuccca

SEQ ID NO: 576 - RNA, 15 nt, Artificial Sequence
  Description of Artificial Sequence:  Nucleic Acid Target
gcucacucccacgcu

SEQ ID NO: 577 - RNA, 15 nt, Artificial Sequence
  Description of Artificial Sequence:  Nucleic Acid Target
ccacgcucgcggcca

SEQ ID NO: 578 - RNA, 15 nt, Artificial Sequence
  Description of Artificial Sequence:  Nucleic Acid Target
ccagcauccccacua

SEQ ID NO: 579 - RNA, 15 nt, Artificial Sequence
  Description of Artificial Sequence:  Nucleic Acid Target
ccccacuacgacaau

SEQ ID NO: 580 - RNA, 15 nt, Artificial Sequence
  Description of Artificial Sequence:  Nucleic Acid Target
cgacaauacgacgcc

SEQ ID NO: 581 - RNA, 15 nt, Artificial Sequence
  Description of Artificial Sequence:  Nucleic Acid Target
ggccgcuuucuguuc

SEQ ID NO: 582 - RNA, 15 nt, Artificial Sequence
  Description of Artificial Sequence:  Nucleic Acid Target
gggaccucugcggau

SEQ ID NO: 583 - RNA, 15 nt, Artificial Sequence
  Description of Artificial Sequence:  Nucleic Acid Target
uuuuccucgucuccc

SEQ ID NO: 584 - RNA, 15 nt, Artificial Sequence
  Description of Artificial Sequence:  Nucleic Acid Target
uccucgucucccagu

SEQ ID NO: 585 - RNA, 15 nt, Artificial Sequence
  Description of Artificial Sequence:  Nucleic Acid Target
cucgucucccaguug

SEQ ID NO: 586 - RNA, 15 nt, Artificial Sequence
  Description of Artificial Sequence:  Nucleic Acid Target
ucccaguuguucacc

SEQ ID NO: 587 - RNA, 15 nt, Artificial Sequence
  Description of Artificial Sequence:  Nucleic Acid Target
caguuguucaccuuc

SEQ ID NO: 588 - RNA, 15 nt, Artificial Sequence
  Description of Artificial Sequence:  Nucleic Acid Target
aguuguucaccuucu

SEQ ID NO: 589 - RNA, 15 nt, Artificial Sequence
  Description of Artificial Sequence:  Nucleic Acid Target
uucaccuucucgccu

SEQ ID NO: 590 - RNA, 15 nt, Artificial Sequence
  Description of Artificial Sequence:  Nucleic Acid Target
ucaccuucucgccuc

SEQ ID NO: 591 - RNA, 15 nt, Artificial Sequence
  Description of Artificial Sequence:  Nucleic Acid Target
accuucucgccucgc

SEQ ID NO: 592 - RNA, 15 nt, Artificial Sequence
  Description of Artificial Sequence:  Nucleic Acid Target
cucgccucgccggua

SEQ ID NO: 593 - RNA, 15 nt, Artificial Sequence
  Description of Artificial Sequence:  Nucleic Acid Target
cgccgguaugagaca

SEQ ID NO: 594 - RNA, 15 nt, Artificial Sequence
  Description of Artificial Sequence:  Nucleic Acid Target
agacaguacaggacu

SEQ ID NO: 595 - RNA, 15 nt, Artificial Sequence
  Description of Artificial Sequence:  Nucleic Acid Target
cugcaauugcucaau

SEQ ID NO: 596 - RNA, 15 nt, Artificial Sequence
  Description of Artificial Sequence:  Nucleic Acid Target
aauugcucaaucuau

SEQ ID NO: 597 - RNA, 15 nt, Artificial Sequence
  Description of Artificial Sequence:  Nucleic Acid Target
gcucaaucuaucccg

SEQ ID NO: 598 - RNA, 15 nt, Artificial Sequence
  Description of Artificial Sequence:  Nucleic Acid Target
ucaaucuaucccggc

SEQ ID NO: 599 - RNA, 15 nt, Artificial Sequence
  Description of Artificial Sequence:  Nucleic Acid Target
aaucuaucccggcca

SEQ ID NO: 600 - RNA, 15 nt, Artificial Sequence
  Description of Artificial Sequence:  Nucleic Acid Target
cauggcuugggauau

SEQ ID NO: 601 - RNA, 15 nt, Artificial Sequence
  Description of Artificial Sequence:  Nucleic Acid Target
uugggauaugaugau

SEQ ID NO: 602 - RNA, 15 nt, Artificial Sequence
  Description of Artificial Sequence:  Nucleic Acid Target
aacuggucgccuaca

SEQ ID NO: 603 - RNA, 15 nt, Artificial Sequence
  Description of Artificial Sequence:  Nucleic Acid Target
gucgccuacaacagc

SEQ ID NO: 604 - RNA, 15 nt, Artificial Sequence
  Description of Artificial Sequence:  Nucleic Acid Target
cagcccuaguggugu

SEQ ID NO: 605 - RNA, 15 nt, Artificial Sequence
  Description of Artificial Sequence:  Nucleic Acid Target
guggugucgcaguua

SEQ ID NO: 606 - RNA, 15 nt, Artificial Sequence
  Description of Artificial Sequence:  Nucleic Acid Target
ucgcaguuacuccgg

SEQ ID NO: 607 - RNA, 15 nt, Artificial Sequence
  Description of Artificial Sequence:  Nucleic Acid Target
cgcaguuacuccgga

SEQ ID NO: 608 - RNA, 15 nt, Artificial Sequence
  Description of Artificial Sequence:  Nucleic Acid Target
aguuacuccggaucc

SEQ ID NO: 609 - RNA, 15 nt, Artificial Sequence
  Description of Artificial Sequence:  Nucleic Acid Target
uccggaucccacaag

SEQ ID NO: 610 - RNA, 15 nt, Artificial Sequence
  Description of Artificial Sequence:  Nucleic Acid Target
cugggcuaaggucuu

SEQ ID NO: 611 - RNA, 15 nt, Artificial Sequence
  Description of Artificial Sequence:  Nucleic Acid Target
cuaaggucuugauug

SEQ ID NO: 612 - RNA, 15 nt, Artificial Sequence
  Description of Artificial Sequence:  Nucleic Acid Target
aaggucuugauugug

SEQ ID NO: 613 - RNA, 15 nt, Artificial Sequence
  Description of Artificial Sequence:  Nucleic Acid Target
ucuugauugugaugu

SEQ ID NO: 614 - RNA, 15 nt, Artificial Sequence
  Description of Artificial Sequence:  Nucleic Acid Target
gugauguuacucuuu

SEQ ID NO: 615 - RNA, 15 nt, Artificial Sequence
  Description of Artificial Sequence:  Nucleic Acid Target
ugauguuacucuuug

SEQ ID NO: 616 - RNA, 15 nt, Artificial Sequence
  Description of Artificial Sequence:  Nucleic Acid Target
uguuacucuuugccg

SEQ ID NO: 617 - RNA, 15 nt, Artificial Sequence
  Description of Artificial Sequence:  Nucleic Acid Target
uuacucuuugccggc

SEQ ID NO: 618 - RNA, 15 nt, Artificial Sequence
  Description of Artificial Sequence:  Nucleic Acid Target
uacucuuugccggcg

SEQ ID NO: 619 - RNA, 15 nt, Artificial Sequence
  Description of Artificial Sequence:  Nucleic Acid Target
ccggcguugacgggg

SEQ ID NO: 620 - RNA, 15 nt, Artificial Sequence
  Description of Artificial Sequence:  Nucleic Acid Target
acggggucacuuaca

SEQ ID NO: 621 - RNA, 15 nt, Artificial Sequence
  Description of Artificial Sequence:  Nucleic Acid Target
ggucacuuacacgac

SEQ ID NO: 622 - RNA, 15 nt, Artificial Sequence
  Description of Artificial Sequence:  Nucleic Acid Target
gucacuuacacgaca

SEQ ID NO: 623 - RNA, 15 nt, Artificial Sequence
  Description of Artificial Sequence:  Nucleic Acid Target
ggggggucgcaagcu

SEQ ID NO: 624 - RNA, 15 nt, Artificial Sequence
  Description of Artificial Sequence:  Nucleic Acid Target
gcaagcucgccacac

SEQ ID NO: 625 - RNA, 15 nt, Artificial Sequence
  Description of Artificial Sequence:  Nucleic Acid Target
agagcgucacguccu

SEQ ID NO: 626 - RNA, 15 nt, Artificial Sequence
  Description of Artificial Sequence:  Nucleic Acid Target
gucacguccuucuuc

SEQ ID NO: 627 - RNA, 15 nt, Artificial Sequence
  Description of Artificial Sequence:  Nucleic Acid Target
acguccuucuucacc

SEQ ID NO: 628 - RNA, 15 nt, Artificial Sequence
  Description of Artificial Sequence:  Nucleic Acid Target
cguccuucuucaccc

SEQ ID NO: 629 - RNA, 15 nt, Artificial Sequence
  Description of Artificial Sequence:  Nucleic Acid Target
uccuucuucacccaa

SEQ ID NO: 630 - RNA, 15 nt, Artificial Sequence
  Description of Artificial Sequence:  Nucleic Acid Target
ccuucuucacccaag

SEQ ID NO: 631 - RNA, 15 nt, Artificial Sequence
  Description of Artificial Sequence:  Nucleic Acid Target
agagaauccagcuca

SEQ ID NO: 632 - RNA, 15 nt, Artificial Sequence
  Description of Artificial Sequence:  Nucleic Acid Target
uccagcucauaaaca

SEQ ID NO: 633 - RNA, 15 nt, Artificial Sequence
  Description of Artificial Sequence:  Nucleic Acid Target
agcucauaaacacca

SEQ ID NO: 634 - RNA, 15 nt, Artificial Sequence
  Description of Artificial Sequence:  Nucleic Acid Target
ggcacaucaacagga

SEQ ID NO: 635 - RNA, 15 nt, Artificial Sequence
  Description of Artificial Sequence:  Nucleic Acid Target
aaugaaucccucaac

SEQ ID NO: 636 - RNA, 15 nt, Artificial Sequence
  Description of Artificial Sequence:  Nucleic Acid Target
aaucccucaacaccg

SEQ ID NO: 637 - RNA, 15 nt, Artificial Sequence
  Description of Artificial Sequence:  Nucleic Acid Target
accggguucuuugcc

SEQ ID NO: 638 - RNA, 15 nt, Artificial Sequence
  Description of Artificial Sequence:  Nucleic Acid Target
ccggguucuuugccg

SEQ ID NO: 639 - RNA, 15 nt, Artificial Sequence
  Description of Artificial Sequence:  Nucleic Acid Target
ggguucuuugccgca

SEQ ID NO: 640 - RNA, 15 nt, Artificial Sequence
  Description of Artificial Sequence:  Nucleic Acid Target
gguucuuugccgcac

SEQ ID NO: 641 - RNA, 15 nt, Artificial Sequence
  Description of Artificial Sequence:  Nucleic Acid Target
gcacuguucuacgca

SEQ ID NO: 642 - RNA, 15 nt, Artificial Sequence
  Description of Artificial Sequence:  Nucleic Acid Target
cacuguucuacgcac

SEQ ID NO: 643 - RNA, 15 nt, Artificial Sequence
  Description of Artificial Sequence:  Nucleic Acid Target
cuguucuacgcacac

SEQ ID NO: 644 - RNA, 15 nt, Artificial Sequence
  Description of Artificial Sequence:  Nucleic Acid Target
cacaaguucaacucg

SEQ ID NO: 645 - RNA, 15 nt, Artificial Sequence
  Description of Artificial Sequence:  Nucleic Acid Target
acaaguucaacucgu

SEQ ID NO: 646 - RNA, 15 nt, Artificial Sequence
  Description of Artificial Sequence:  Nucleic Acid Target
uucaacucguccgga

SEQ ID NO: 647 - RNA, 15 nt, Artificial Sequence
  Description of Artificial Sequence:  Nucleic Acid Target
aacucguccggaugc

SEQ ID NO: 648 - RNA, 15 nt, Artificial Sequence
  Description of Artificial Sequence:  Nucleic Acid Target
ugcagcuccaucgac

SEQ ID NO: 649 - RNA, 15 nt, Artificial Sequence
  Description of Artificial Sequence:  Nucleic Acid Target
caccuauaccgagcc

SEQ ID NO: 650 - RNA, 15 nt, Artificial Sequence
  Description of Artificial Sequence:  Nucleic Acid Target
cgagccuagggaccu

SEQ ID NO: 651 - RNA, 15 nt, Artificial Sequence
  Description of Artificial Sequence:  Nucleic Acid Target
ccuggaucagaggcc

SEQ ID NO: 652 - RNA, 15 nt, Artificial Sequence
  Description of Artificial Sequence:  Nucleic Acid Target
gaggccuuacugcug

SEQ ID NO: 653 - RNA, 15 nt, Artificial Sequence
  Description of Artificial Sequence:  Nucleic Acid Target
ccaguguacuguuuc

SEQ ID NO: 654 - RNA, 15 nt, Artificial Sequence
  Description of Artificial Sequence:  Nucleic Acid Target
guacuguuucacccc

SEQ ID NO: 655 - RNA, 15 nt, Artificial Sequence
  Description of Artificial Sequence:  Nucleic Acid Target
uacuguuucacccca

SEQ ID NO: 656 - RNA, 15 nt, Artificial Sequence
  Description of Artificial Sequence:  Nucleic Acid Target
acuguuucaccccaa

SEQ ID NO: 657 - RNA, 15 nt, Artificial Sequence
  Description of Artificial Sequence:  Nucleic Acid Target
ugcugcuucucaaca

SEQ ID NO: 658 - RNA, 15 nt, Artificial Sequence
  Description of Artificial Sequence:  Nucleic Acid Target
gcugcuucucaacaa

SEQ ID NO: 659 - RNA, 15 nt, Artificial Sequence
  Description of Artificial Sequence:  Nucleic Acid Target
ugcuucucaacaaca

SEQ ID NO: 660 - RNA, 15 nt, Artificial Sequence
  Description of Artificial Sequence:  Nucleic Acid Target
acuggguucaccaag

SEQ ID NO: 661 - RNA, 15 nt, Artificial Sequence
  Description of Artificial Sequence:  Nucleic Acid Target
cuggguucaccaaga

SEQ ID NO: 662 - RNA, 15 nt, Artificial Sequence
  Description of Artificial Sequence:  Nucleic Acid Target
cacggauugcuuucg

SEQ ID NO: 663 - RNA, 15 nt, Artificial Sequence
  Description of Artificial Sequence:  Nucleic Acid Target
gauugcuuucggaag

SEQ ID NO: 664 - RNA, 15 nt, Artificial Sequence
  Description of Artificial Sequence:  Nucleic Acid Target
auugcuuucggaagc

SEQ ID NO: 665 - RNA, 15 nt, Artificial Sequence
  Description of Artificial Sequence:  Nucleic Acid Target
uugcuuucggaagca

SEQ ID NO: 666 - RNA, 15 nt, Artificial Sequence
  Description of Artificial Sequence:  Nucleic Acid Target
aacaccuagguguau

SEQ ID NO: 667 - RNA, 15 nt, Artificial Sequence
  Description of Artificial Sequence:  Nucleic Acid Target
uagguguauaguuga

SEQ ID NO: 668 - RNA, 15 nt, Artificial Sequence
  Description of Artificial Sequence:  Nucleic Acid Target
gguguauaguugacu

SEQ ID NO: 669 - RNA, 15 nt, Artificial Sequence
  Description of Artificial Sequence:  Nucleic Acid Target
guauaguugacuacc

SEQ ID NO: 670 - RNA, 15 nt, Artificial Sequence
  Description of Artificial Sequence:  Nucleic Acid Target
guugacuacccauac

SEQ ID NO: 671 - RNA, 15 nt, Artificial Sequence
  Description of Artificial Sequence:  Nucleic Acid Target
uacccauacaggcuc

SEQ ID NO: 672 - RNA, 15 nt, Artificial Sequence
  Description of Artificial Sequence:  Nucleic Acid Target
acaggcucuggcacu

SEQ ID NO: 673 - RNA, 15 nt, Artificial Sequence
  Description of Artificial Sequence:  Nucleic Acid Target
uggcacuaccccugc

SEQ ID NO: 674 - RNA, 15 nt, Artificial Sequence
  Description of Artificial Sequence:  Nucleic Acid Target
gcacugucaacuuua

SEQ ID NO: 675 - RNA, 15 nt, Artificial Sequence
  Description of Artificial Sequence:  Nucleic Acid Target
gucaacuuuaccauc

SEQ ID NO: 676 - RNA, 15 nt, Artificial Sequence
  Description of Artificial Sequence:  Nucleic Acid Target
ucaacuuuaccaucu

SEQ ID NO: 677 - RNA, 15 nt, Artificial Sequence
  Description of Artificial Sequence:  Nucleic Acid Target
caacuuuaccaucuu

SEQ ID NO: 678 - RNA, 15 nt, Artificial Sequence
  Description of Artificial Sequence:  Nucleic Acid Target
ccaucuuuaagguua

SEQ ID NO: 679 - RNA, 15 nt, Artificial Sequence
  Description of Artificial Sequence:  Nucleic Acid Target
caucuuuaagguuag

SEQ ID NO: 680 - RNA, 15 nt, Artificial Sequence
  Description of Artificial Sequence:  Nucleic Acid Target
uuaagguuaggaugu

SEQ ID NO: 681 - RNA, 15 nt, Artificial Sequence
  Description of Artificial Sequence:  Nucleic Acid Target
uaagguuaggaugua

SEQ ID NO: 682 - RNA, 15 nt, Artificial Sequence
  Description of Artificial Sequence:  Nucleic Acid Target
aggauguaugugggg

SEQ ID NO: 683 - RNA, 15 nt, Artificial Sequence
  Description of Artificial Sequence:  Nucleic Acid Target
cuggacucgaggaga

SEQ ID NO: 684 - RNA, 15 nt, Artificial Sequence
  Description of Artificial Sequence:  Nucleic Acid Target
agacacuucccuguu

SEQ ID NO: 685 - RNA, 15 nt, Artificial Sequence
  Description of Artificial Sequence:  Nucleic Acid Target
gacacuucccuguuc

SEQ ID NO: 686 - RNA, 15 nt, Artificial Sequence
  Description of Artificial Sequence:  Nucleic Acid Target
ucccuguuccuucac

SEQ ID NO: 687 - RNA, 15 nt, Artificial Sequence
  Description of Artificial Sequence:  Nucleic Acid Target
cccuguuccuucacc

SEQ ID NO: 688 - RNA, 15 nt, Artificial Sequence
  Description of Artificial Sequence:  Nucleic Acid Target
uguuccuucaccacc

SEQ ID NO: 689 - RNA, 15 nt, Artificial Sequence
  Description of Artificial Sequence:  Nucleic Acid Target
guuccuucaccaccc

SEQ ID NO: 690 - RNA, 15 nt, Artificial Sequence
  Description of Artificial Sequence:  Nucleic Acid Target
ccacccuaccggcuc

SEQ ID NO: 691 - RNA, 15 nt, Artificial Sequence
  Description of Artificial Sequence:  Nucleic Acid Target
accggcucuguccac

SEQ ID NO: 692 - RNA, 15 nt, Artificial Sequence
  Description of Artificial Sequence:  Nucleic Acid Target
gcucuguccacuggu

SEQ ID NO: 693 - RNA, 15 nt, Artificial Sequence
  Description of Artificial Sequence:  Nucleic Acid Target
cacugguuugaucca

SEQ ID NO: 694 - RNA, 15 nt, Artificial Sequence
  Description of Artificial Sequence:  Nucleic Acid Target
acugguuugauccac

SEQ ID NO: 695 - RNA, 15 nt, Artificial Sequence
  Description of Artificial Sequence:  Nucleic Acid Target
guuugauccaccucc

SEQ ID NO: 696 - RNA, 15 nt, Artificial Sequence
  Description of Artificial Sequence:  Nucleic Acid Target
gugcaguaccuguac

SEQ ID NO: 697 - RNA, 15 nt, Artificial Sequence
  Description of Artificial Sequence:  Nucleic Acid Target
uaccuguacgguaua

SEQ ID NO: 698 - RNA, 15 nt, Artificial Sequence
  Description of Artificial Sequence:  Nucleic Acid Target
guacgguauaggguc

SEQ ID NO: 699 - RNA, 15 nt, Artificial Sequence
  Description of Artificial Sequence:  Nucleic Acid Target
acgguauagggucag

SEQ ID NO: 700 - RNA, 15 nt, Artificial Sequence
  Description of Artificial Sequence:  Nucleic Acid Target
auagggucagcgguu

SEQ ID NO: 701 - RNA, 15 nt, Artificial Sequence
  Description of Artificial Sequence:  Nucleic Acid Target
cagcgguugucuccu

SEQ ID NO: 702 - RNA, 15 nt, Artificial Sequence
  Description of Artificial Sequence:  Nucleic Acid Target
cgguugucuccuuug

SEQ ID NO: 703 - RNA, 15 nt, Artificial Sequence
  Description of Artificial Sequence:  Nucleic Acid Target
guugucuccuuugug

SEQ ID NO: 704 - RNA, 15 nt, Artificial Sequence
  Description of Artificial Sequence:  Nucleic Acid Target
gucuccuuugugauc

SEQ ID NO: 705 - RNA, 15 nt, Artificial Sequence
  Description of Artificial Sequence:  Nucleic Acid Target
ucuccuuugugauca

SEQ ID NO: 706 - RNA, 15 nt, Artificial Sequence
  Description of Artificial Sequence:  Nucleic Acid Target
uugugaucaaauggg

SEQ ID NO: 707 - RNA, 15 nt, Artificial Sequence
  Description of Artificial Sequence:  Nucleic Acid Target
ugggaguauaucgug

SEQ ID NO: 708 - RNA, 15 nt, Artificial Sequence
  Description of Artificial Sequence:  Nucleic Acid Target
ggaguauaucguguu

SEQ ID NO: 709 - RNA, 15 nt, Artificial Sequence
  Description of Artificial Sequence:  Nucleic Acid Target
aguauaucguguugc

SEQ ID NO: 710 - RNA, 15 nt, Artificial Sequence
  Description of Artificial Sequence:  Nucleic Acid Target
aucguguugcuuuuc

SEQ ID NO: 711 - RNA, 15 nt, Artificial Sequence
  Description of Artificial Sequence:  Nucleic Acid Target
uguugcuuuuccuuc

SEQ ID NO: 712 - RNA, 15 nt, Artificial Sequence
  Description of Artificial Sequence:  Nucleic Acid Target
guugcuuuuccuucu

SEQ ID NO: 713 - RNA, 15 nt, Artificial Sequence
  Description of Artificial Sequence:  Nucleic Acid Target
uugcuuuuccuucuc

SEQ ID NO: 714 - RNA, 15 nt, Artificial Sequence
  Description of Artificial Sequence:  Nucleic Acid Target
ugcuuuuccuucucc

SEQ ID NO: 715 - RNA, 15 nt, Artificial Sequence
  Description of Artificial Sequence:  Nucleic Acid Target
uuuuccuucuccugg

SEQ ID NO: 716 - RNA, 15 nt, Artificial Sequence
  Description of Artificial Sequence:  Nucleic Acid Target
uuuccuucuccuggc

SEQ ID NO: 717 - RNA, 15 nt, Artificial Sequence
  Description of Artificial Sequence:  Nucleic Acid Target
uccuucuccuggcgg

SEQ ID NO: 718 - RNA, 15 nt, Artificial Sequence
  Description of Artificial Sequence:  Nucleic Acid Target
gccugcuuguggaug

SEQ ID NO: 719 - RNA, 15 nt, Artificial Sequence
  Description of Artificial Sequence:  Nucleic Acid Target
ugcugauagcccagg

SEQ ID NO: 720 - RNA, 15 nt, Artificial Sequence
  Description of Artificial Sequence:  Nucleic Acid Target
gcggcgucccuggcc

SEQ ID NO: 721 - RNA, 15 nt, Artificial Sequence
  Description of Artificial Sequence:  Nucleic Acid Target
auggcauucucuccu

SEQ ID NO: 722 - RNA, 15 nt, Artificial Sequence
  Description of Artificial Sequence:  Nucleic Acid Target
uggcauucucuccuu

SEQ ID NO: 723 - RNA, 15 nt, Artificial Sequence
  Description of Artificial Sequence:  Nucleic Acid Target
gcauucucuccuucc

SEQ ID NO: 724 - RNA, 15 nt, Artificial Sequence
  Description of Artificial Sequence:  Nucleic Acid Target
auucucuccuuccuu

SEQ ID NO: 725 - RNA, 15 nt, Artificial Sequence
  Description of Artificial Sequence:  Nucleic Acid Target
cucuccuuccuugug

SEQ ID NO: 726 - RNA, 15 nt, Artificial Sequence
  Description of Artificial Sequence:  Nucleic Acid Target
ucuccuuccuugugu

SEQ ID NO: 727 - RNA, 15 nt, Artificial Sequence
  Description of Artificial Sequence:  Nucleic Acid Target
ccuuccuuguguuuu

SEQ ID NO: 728 - RNA, 15 nt, Artificial Sequence
  Description of Artificial Sequence:  Nucleic Acid Target
cuuguguuuuucugu

SEQ ID NO: 729 - RNA, 15 nt, Artificial Sequence
  Description of Artificial Sequence:  Nucleic Acid Target
uuguguuuuucugug

SEQ ID NO: 730 - RNA, 15 nt, Artificial Sequence
  Description of Artificial Sequence:  Nucleic Acid Target
uguguuuuucugugc

SEQ ID NO: 731 - RNA, 15 nt, Artificial Sequence
  Description of Artificial Sequence:  Nucleic Acid Target
guguuuuucugugcc

SEQ ID NO: 732 - RNA, 15 nt, Artificial Sequence
  Description of Artificial Sequence:  Nucleic Acid Target
uguuuuucugugccg

SEQ ID NO: 733 - RNA, 15 nt, Artificial Sequence
  Description of Artificial Sequence:  Nucleic Acid Target
cgcugcuccugcucc

SEQ ID NO: 734 - RNA, 15 nt, Artificial Sequence
  Description of Artificial Sequence:  Nucleic Acid Target
cuggcguuaccacca

SEQ ID NO: 735 - RNA, 15 nt, Artificial Sequence
  Description of Artificial Sequence:  Nucleic Acid Target
uggcguuaccaccac

SEQ ID NO: 736 - RNA, 15 nt, Artificial Sequence
  Description of Artificial Sequence:  Nucleic Acid Target
gcugcaucgugugga

SEQ ID NO: 737 - RNA, 15 nt, Artificial Sequence
  Description of Artificial Sequence:  Nucleic Acid Target
gggugguuuuuguag

SEQ ID NO: 738 - RNA, 15 nt, Artificial Sequence
  Description of Artificial Sequence:  Nucleic Acid Target
ggugguuuuuguagg

SEQ ID NO: 739 - RNA, 15 nt, Artificial Sequence
  Description of Artificial Sequence:  Nucleic Acid Target
gugguuuuuguaggu

SEQ ID NO: 740 - RNA, 15 nt, Artificial Sequence
  Description of Artificial Sequence:  Nucleic Acid Target
ugguuuuuguagguc

SEQ ID NO: 741 - RNA, 15 nt, Artificial Sequence
  Description of Artificial Sequence:  Nucleic Acid Target
uuuuuguaggucuaa

SEQ ID NO: 742 - RNA, 15 nt, Artificial Sequence
  Description of Artificial Sequence:  Nucleic Acid Target
uguaggucuaauacu

SEQ ID NO: 743 - RNA, 15 nt, Artificial Sequence
  Description of Artificial Sequence:  Nucleic Acid Target
uaggucuaauacucu

SEQ ID NO: 744 - RNA, 15 nt, Artificial Sequence
  Description of Artificial Sequence:  Nucleic Acid Target
gucuaauacucuuga

SEQ ID NO: 745 - RNA, 15 nt, Artificial Sequence
  Description of Artificial Sequence:  Nucleic Acid Target
uaauacucuugaccu

SEQ ID NO: 746 - RNA, 15 nt, Artificial Sequence
  Description of Artificial Sequence:  Nucleic Acid Target
auacucuugaccuug

SEQ ID NO: 747 - RNA, 15 nt, Artificial Sequence
  Description of Artificial Sequence:  Nucleic Acid Target
uugaccuugucacca

SEQ ID NO: 748 - RNA, 15 nt, Artificial Sequence
  Description of Artificial Sequence:  Nucleic Acid Target
accuugucaccacac

SEQ ID NO: 749 - RNA, 15 nt, Artificial Sequence
  Description of Artificial Sequence:  Nucleic Acid Target
ccacacuacaaagug

SEQ ID NO: 750 - RNA, 15 nt, Artificial Sequence
  Description of Artificial Sequence:  Nucleic Acid Target
aaaguguuccucgcc

SEQ ID NO: 751 - RNA, 15 nt, Artificial Sequence
  Description of Artificial Sequence:  Nucleic Acid Target
aaguguuccucgcca

SEQ ID NO: 752 - RNA, 15 nt, Artificial Sequence
  Description of Artificial Sequence:  Nucleic Acid Target
uguuccucgccaggc

SEQ ID NO: 753 - RNA, 15 nt, Artificial Sequence
  Description of Artificial Sequence:  Nucleic Acid Target
ccaggcucauauggu

SEQ ID NO: 754 - RNA, 15 nt, Artificial Sequence
  Description of Artificial Sequence:  Nucleic Acid Target
ggcucauaugguggu

SEQ ID NO: 755 - RNA, 15 nt, Artificial Sequence
  Description of Artificial Sequence:  Nucleic Acid Target
auacuuuaucaccag

SEQ ID NO: 756 - RNA, 15 nt, Artificial Sequence
  Description of Artificial Sequence:  Nucleic Acid Target
acuuuaucaccaggg

SEQ ID NO: 757 - RNA, 15 nt, Artificial Sequence
  Description of Artificial Sequence:  Nucleic Acid Target
cagagcuaaucuuug

SEQ ID NO: 758 - RNA, 15 nt, Artificial Sequence
  Description of Artificial Sequence:  Nucleic Acid Target
agcuaaucuuugaca

SEQ ID NO: 759 - RNA, 15 nt, Artificial Sequence
  Description of Artificial Sequence:  Nucleic Acid Target
cuaaucuuugacauu

SEQ ID NO: 760 - RNA, 15 nt, Artificial Sequence
  Description of Artificial Sequence:  Nucleic Acid Target
uaaucuuugacauua

SEQ ID NO: 761 - RNA, 15 nt, Artificial Sequence
  Description of Artificial Sequence:  Nucleic Acid Target
uugacauuaccaaac

SEQ ID NO: 762 - RNA, 15 nt, Artificial Sequence
  Description of Artificial Sequence:  Nucleic Acid Target
ugacauuaccaaacu

SEQ ID NO: 763 - RNA, 15 nt, Artificial Sequence
  Description of Artificial Sequence:  Nucleic Acid Target
ccaaacuccugcucg

SEQ ID NO: 764 - RNA, 15 nt, Artificial Sequence
  Description of Artificial Sequence:  Nucleic Acid Target
uccugcucgccauuc

SEQ ID NO: 765 - RNA, 15 nt, Artificial Sequence
  Description of Artificial Sequence:  Nucleic Acid Target
ucgccauucucgguc

SEQ ID NO: 766 - RNA, 15 nt, Artificial Sequence
  Description of Artificial Sequence:  Nucleic Acid Target
cgccauucucggucc

SEQ ID NO: 767 - RNA, 15 nt, Artificial Sequence
  Description of Artificial Sequence:  Nucleic Acid Target
ccauucucgguccgc

SEQ ID NO: 768 - RNA, 15 nt, Artificial Sequence
  Description of Artificial Sequence:  Nucleic Acid Target
ucucgguccgcucau

SEQ ID NO: 769 - RNA, 15 nt, Artificial Sequence
  Description of Artificial Sequence:  Nucleic Acid Target
guccgcucauggugc

SEQ ID NO: 770 - RNA, 15 nt, Artificial Sequence
  Description of Artificial Sequence:  Nucleic Acid Target
uggugcuccaggcug

SEQ ID NO: 771 - RNA, 15 nt, Artificial Sequence
  Description of Artificial Sequence:  Nucleic Acid Target
augccguacuuugua

SEQ ID NO: 772 - RNA, 15 nt, Artificial Sequence
  Description of Artificial Sequence:  Nucleic Acid Target
ccguacuuuguacgc

SEQ ID NO: 773 - RNA, 15 nt, Artificial Sequence
  Description of Artificial Sequence:  Nucleic Acid Target
cguacuuuguacgcg

SEQ ID NO: 774 - RNA, 15 nt, Artificial Sequence
  Description of Artificial Sequence:  Nucleic Acid Target
acuuuguacgcgcuc

SEQ ID NO: 775 - RNA, 15 nt, Artificial Sequence
  Description of Artificial Sequence:  Nucleic Acid Target
acgcgcucaggggcu

SEQ ID NO: 776 - RNA, 15 nt, Artificial Sequence
  Description of Artificial Sequence:  Nucleic Acid Target
aggggcuuauucgug

SEQ ID NO: 777 - RNA, 15 nt, Artificial Sequence
  Description of Artificial Sequence:  Nucleic Acid Target
ggggcuuauucgugc

SEQ ID NO: 778 - RNA, 15 nt, Artificial Sequence
  Description of Artificial Sequence:  Nucleic Acid Target
ggcuuauucgugcau

SEQ ID NO: 779 - RNA, 15 nt, Artificial Sequence
  Description of Artificial Sequence:  Nucleic Acid Target
gcuuauucgugcaug

SEQ ID NO: 780 - RNA, 15 nt, Artificial Sequence
  Description of Artificial Sequence:  Nucleic Acid Target
ugcauguuggugcgg

SEQ ID NO: 781 - RNA, 15 nt, Artificial Sequence
  Description of Artificial Sequence:  Nucleic Acid Target
ggaaaguagccggag

SEQ ID NO: 782 - RNA, 15 nt, Artificial Sequence
  Description of Artificial Sequence:  Nucleic Acid Target
gacagguacguacgu

SEQ ID NO: 783 - RNA, 15 nt, Artificial Sequence
  Description of Artificial Sequence:  Nucleic Acid Target
gguacguacgucuau

SEQ ID NO: 784 - RNA, 15 nt, Artificial Sequence
  Description of Artificial Sequence:  Nucleic Acid Target
cguacgucuaugacc

SEQ ID NO: 785 - RNA, 15 nt, Artificial Sequence
  Description of Artificial Sequence:  Nucleic Acid Target
uacgucuaugaccau

SEQ ID NO: 786 - RNA, 15 nt, Artificial Sequence
  Description of Artificial Sequence:  Nucleic Acid Target
ugaccaucuuacccc

SEQ ID NO: 787 - RNA, 15 nt, Artificial Sequence
  Description of Artificial Sequence:  Nucleic Acid Target
accaucuuaccccgc

SEQ ID NO: 788 - RNA, 15 nt, Artificial Sequence
  Description of Artificial Sequence:  Nucleic Acid Target
ccaucuuaccccgcu

SEQ ID NO: 789 - RNA, 15 nt, Artificial Sequence
  Description of Artificial Sequence:  Nucleic Acid Target
uggcaguagagcccg

SEQ ID NO: 790 - RNA, 15 nt, Artificial Sequence
  Description of Artificial Sequence:  Nucleic Acid Target
ucgucuucucugaca

SEQ ID NO: 791 - RNA, 15 nt, Artificial Sequence
  Description of Artificial Sequence:  Nucleic Acid Target
gucuucucugacaug

SEQ ID NO: 792 - RNA, 15 nt, Artificial Sequence
  Description of Artificial Sequence:  Nucleic Acid Target
agauacuucugggac

SEQ ID NO: 793 - RNA, 15 nt, Artificial Sequence
  Description of Artificial Sequence:  Nucleic Acid Target
gauacuucugggacc

SEQ ID NO: 794 - RNA, 15 nt, Artificial Sequence
  Description of Artificial Sequence:  Nucleic Acid Target
ggccgauagcauuga

SEQ ID NO: 795 - RNA, 15 nt, Artificial Sequence
  Description of Artificial Sequence:  Nucleic Acid Target
auagcauugaagggc

SEQ ID NO: 796 - RNA, 15 nt, Artificial Sequence
  Description of Artificial Sequence:  Nucleic Acid Target
acggccuacgcccaa

SEQ ID NO: 797 - RNA, 15 nt, Artificial Sequence
  Description of Artificial Sequence:  Nucleic Acid Target
ggggccuacuugguu

SEQ ID NO: 798 - RNA, 15 nt, Artificial Sequence
  Description of Artificial Sequence:  Nucleic Acid Target
gccuacuugguugca

SEQ ID NO: 799 - RNA, 15 nt, Artificial Sequence
  Description of Artificial Sequence:  Nucleic Acid Target
acuugguugcauugu

SEQ ID NO: 800 - RNA, 15 nt, Artificial Sequence
  Description of Artificial Sequence:  Nucleic Acid Target
guugcauuguuacua

SEQ ID NO: 801 - RNA, 15 nt, Artificial Sequence
  Description of Artificial Sequence:  Nucleic Acid Target
gcauuguuacuagcc

SEQ ID NO: 802 - RNA, 15 nt, Artificial Sequence
  Description of Artificial Sequence:  Nucleic Acid Target
cauuguuacuagccu

SEQ ID NO: 803 - RNA, 15 nt, Artificial Sequence
  Description of Artificial Sequence:  Nucleic Acid Target
uguuacuagccucac

SEQ ID NO: 804 - RNA, 15 nt, Artificial Sequence
  Description of Artificial Sequence:  Nucleic Acid Target
accaggucgaagggg

SEQ ID NO: 805 - RNA, 15 nt, Artificial Sequence
  Description of Artificial Sequence:  Nucleic Acid Target
acacaaucuuuccug

SEQ ID NO: 806 - RNA, 15 nt, Artificial Sequence
  Description of Artificial Sequence:  Nucleic Acid Target
acaaucuuuccuggc

SEQ ID NO: 807 - RNA, 15 nt, Artificial Sequence
  Description of Artificial Sequence:  Nucleic Acid Target
caaucuuuccuggcg

SEQ ID NO: 808 - RNA, 15 nt, Artificial Sequence
  Description of Artificial Sequence:  Nucleic Acid Target
aaucuuuccuggcga

SEQ ID NO: 809 - RNA, 15 nt, Artificial Sequence
  Description of Artificial Sequence:  Nucleic Acid Target
ccugcguuaauggug

SEQ ID NO: 810 - RNA, 15 nt, Artificial Sequence
  Description of Artificial Sequence:  Nucleic Acid Target
cugcguuaauggugu

SEQ ID NO: 811 - RNA, 15 nt, Artificial Sequence
  Description of Artificial Sequence:  Nucleic Acid Target
ggaccgucuuccacg

SEQ ID NO: 812 - RNA, 15 nt, Artificial Sequence
  Description of Artificial Sequence:  Nucleic Acid Target
accgucuuccacggc

SEQ ID NO: 813 - RNA, 15 nt, Artificial Sequence
  Description of Artificial Sequence:  Nucleic Acid Target
ccgucuuccacggcg

SEQ ID NO: 814 - RNA, 15 nt, Artificial Sequence
  Description of Artificial Sequence:  Nucleic Acid Target
gcccaaucacccaaa

SEQ ID NO: 815 - RNA, 15 nt, Artificial Sequence
  Description of Artificial Sequence:  Nucleic Acid Target
caaauguacacuaau

SEQ ID NO: 816 - RNA, 15 nt, Artificial Sequence
  Description of Artificial Sequence:  Nucleic Acid Target
guacacuaauguaga

SEQ ID NO: 817 - RNA, 15 nt, Artificial Sequence
  Description of Artificial Sequence:  Nucleic Acid Target
cuaauguagaccaag

SEQ ID NO: 818 - RNA, 15 nt, Artificial Sequence
  Description of Artificial Sequence:  Nucleic Acid Target
aagaccucgucggcu

SEQ ID NO: 819 - RNA, 15 nt, Artificial Sequence
  Description of Artificial Sequence:  Nucleic Acid Target
accucgucggcuggc

SEQ ID NO: 820 - RNA, 15 nt, Artificial Sequence
  Description of Artificial Sequence:  Nucleic Acid Target
cugcgguagcucgga

SEQ ID NO: 821 - RNA, 15 nt, Artificial Sequence
  Description of Artificial Sequence:  Nucleic Acid Target
cugacgucauuccgg

SEQ ID NO: 822 - RNA, 15 nt, Artificial Sequence
  Description of Artificial Sequence:  Nucleic Acid Target
gacccgucuccuauu

SEQ ID NO: 823 - RNA, 15 nt, Artificial Sequence
  Description of Artificial Sequence:  Nucleic Acid Target
cccgucuccuauuug

SEQ ID NO: 824 - RNA, 15 nt, Artificial Sequence
  Description of Artificial Sequence:  Nucleic Acid Target
gucuccuauuugaag

SEQ ID NO: 825 - RNA, 15 nt, Artificial Sequence
  Description of Artificial Sequence:  Nucleic Acid Target
cuccuauuugaaggg

SEQ ID NO: 826 - RNA, 15 nt, Artificial Sequence
  Description of Artificial Sequence:  Nucleic Acid Target
uccuauuugaagggc

SEQ ID NO: 827 - RNA, 15 nt, Artificial Sequence
  Description of Artificial Sequence:  Nucleic Acid Target
aagggcucuucgggu

SEQ ID NO: 828 - RNA, 15 nt, Artificial Sequence
  Description of Artificial Sequence:  Nucleic Acid Target
gggcucuucgggugg

SEQ ID NO: 829 - RNA, 15 nt, Artificial Sequence
  Description of Artificial Sequence:  Nucleic Acid Target
guggacuucauaccc

SEQ ID NO: 830 - RNA, 15 nt, Artificial Sequence
  Description of Artificial Sequence:  Nucleic Acid Target
uggacuucauacccg

SEQ ID NO: 831 - RNA, 15 nt, Artificial Sequence
  Description of Artificial Sequence:  Nucleic Acid Target
acuucauacccguug

SEQ ID NO: 832 - RNA, 15 nt, Artificial Sequence
  Description of Artificial Sequence:  Nucleic Acid Target
uacccguugagucua

SEQ ID NO: 833 - RNA, 15 nt, Artificial Sequence
  Description of Artificial Sequence:  Nucleic Acid Target
guugagucuauggaa

SEQ ID NO: 834 - RNA, 15 nt, Artificial Sequence
  Description of Artificial Sequence:  Nucleic Acid Target
ugagucuauggaaac

SEQ ID NO: 835 - RNA, 15 nt, Artificial Sequence
  Description of Artificial Sequence:  Nucleic Acid Target
ggaaacuacuaugcg

SEQ ID NO: 836 - RNA, 15 nt, Artificial Sequence
  Description of Artificial Sequence:  Nucleic Acid Target
aacuacuaugcgguc

SEQ ID NO: 837 - RNA, 15 nt, Artificial Sequence
  Description of Artificial Sequence:  Nucleic Acid Target
augcgguccccgguc

SEQ ID NO: 838 - RNA, 15 nt, Artificial Sequence
  Description of Artificial Sequence:  Nucleic Acid Target
ccccggucuucacgg

SEQ ID NO: 839 - RNA, 15 nt, Artificial Sequence
  Description of Artificial Sequence:  Nucleic Acid Target
ccggucuucacggac

SEQ ID NO: 840 - RNA, 15 nt, Artificial Sequence
  Description of Artificial Sequence:  Nucleic Acid Target
cggucuucacggaca

SEQ ID NO: 841 - RNA, 15 nt, Artificial Sequence
  Description of Artificial Sequence:  Nucleic Acid Target
gacaacucaucuccc

SEQ ID NO: 842 - RNA, 15 nt, Artificial Sequence
  Description of Artificial Sequence:  Nucleic Acid Target
aacucaucucccccg

SEQ ID NO: 843 - RNA, 15 nt, Artificial Sequence
  Description of Artificial Sequence:  Nucleic Acid Target
cucaucucccccggc

SEQ ID NO: 844 - RNA, 15 nt, Artificial Sequence
  Description of Artificial Sequence:  Nucleic Acid Target
cggccguaccgcaga

SEQ ID NO: 845 - RNA, 15 nt, Artificial Sequence
  Description of Artificial Sequence:  Nucleic Acid Target
cagacauuccaagug

SEQ ID NO: 846 - RNA, 15 nt, Artificial Sequence
  Description of Artificial Sequence:  Nucleic Acid Target
agacauuccaagugg

SEQ ID NO: 847 - RNA, 15 nt, Artificial Sequence
  Description of Artificial Sequence:  Nucleic Acid Target
ggcccaucuacacgc

SEQ ID NO: 848 - RNA, 15 nt, Artificial Sequence
  Description of Artificial Sequence:  Nucleic Acid Target
cccaucuacacgcuc

SEQ ID NO: 849 - RNA, 15 nt, Artificial Sequence
  Description of Artificial Sequence:  Nucleic Acid Target
acacgcucccacugg

SEQ ID NO: 850 - RNA, 15 nt, Artificial Sequence
  Description of Artificial Sequence:  Nucleic Acid Target
acaagguacucgucc

SEQ ID NO: 851 - RNA, 15 nt, Artificial Sequence
  Description of Artificial Sequence:  Nucleic Acid Target
agguacucguccuga

SEQ ID NO: 852 - RNA, 15 nt, Artificial Sequence
  Description of Artificial Sequence:  Nucleic Acid Target
uacucguccugaacc

SEQ ID NO: 853 - RNA, 15 nt, Artificial Sequence
  Description of Artificial Sequence:  Nucleic Acid Target
aacccaucuguugcc

SEQ ID NO: 854 - RNA, 15 nt, Artificial Sequence
  Description of Artificial Sequence:  Nucleic Acid Target
gccaccuuggguuuu

SEQ ID NO: 855 - RNA, 15 nt, Artificial Sequence
  Description of Artificial Sequence:  Nucleic Acid Target
cuuggguuuuggggc

SEQ ID NO: 856 - RNA, 15 nt, Artificial Sequence
  Description of Artificial Sequence:  Nucleic Acid Target
uuggguuuuggggcg

SEQ ID NO: 857 - RNA, 15 nt, Artificial Sequence
  Description of Artificial Sequence:  Nucleic Acid Target
uggguuuuggggcgu

SEQ ID NO: 858 - RNA, 15 nt, Artificial Sequence
  Description of Artificial Sequence:  Nucleic Acid Target
ggggcguauaugucu

SEQ ID NO: 859 - RNA, 15 nt, Artificial Sequence
  Description of Artificial Sequence:  Nucleic Acid Target
ggcguauaugucuaa

SEQ ID NO: 860 - RNA, 15 nt, Artificial Sequence
  Description of Artificial Sequence:  Nucleic Acid Target
uauaugucuaaggca

SEQ ID NO: 861 - RNA, 15 nt, Artificial Sequence
  Description of Artificial Sequence:  Nucleic Acid Target
uaugucuaaggcaca

SEQ ID NO: 862 - RNA, 15 nt, Artificial Sequence
  Description of Artificial Sequence:  Nucleic Acid Target
acaugguaccgaccc

SEQ ID NO: 863 - RNA, 15 nt, Artificial Sequence
  Description of Artificial Sequence:  Nucleic Acid Target
ggaccauuaccacgg

SEQ ID NO: 864 - RNA, 15 nt, Artificial Sequence
  Description of Artificial Sequence:  Nucleic Acid Target
gaccauuaccacggg

SEQ ID NO: 865 - RNA, 15 nt, Artificial Sequence
  Description of Artificial Sequence:  Nucleic Acid Target
cccccaucacguacu

SEQ ID NO: 866 - RNA, 15 nt, Artificial Sequence
  Description of Artificial Sequence:  Nucleic Acid Target
aucacguacuccacc

SEQ ID NO: 867 - RNA, 15 nt, Artificial Sequence
  Description of Artificial Sequence:  Nucleic Acid Target
acguacuccaccuau

SEQ ID NO: 868 - RNA, 15 nt, Artificial Sequence
  Description of Artificial Sequence:  Nucleic Acid Target
uggauguucuggggg

SEQ ID NO: 869 - RNA, 15 nt, Artificial Sequence
  Description of Artificial Sequence:  Nucleic Acid Target
ggauguucugggggc

SEQ ID NO: 870 - RNA, 15 nt, Artificial Sequence
  Description of Artificial Sequence:  Nucleic Acid Target
ggcgccuaugauauc

SEQ ID NO: 871 - RNA, 15 nt, Artificial Sequence
  Description of Artificial Sequence:  Nucleic Acid Target
cuaugauaucauaau

SEQ ID NO: 872 - RNA, 15 nt, Artificial Sequence
  Description of Artificial Sequence:  Nucleic Acid Target
augauaucauaauau

SEQ ID NO: 873 - RNA, 15 nt, Artificial Sequence
  Description of Artificial Sequence:  Nucleic Acid Target
ugccacucaacugac

SEQ ID NO: 874 - RNA, 15 nt, Artificial Sequence
  Description of Artificial Sequence:  Nucleic Acid Target
acugacucgacuacc

SEQ ID NO: 875 - RNA, 15 nt, Artificial Sequence
  Description of Artificial Sequence:  Nucleic Acid Target
cucgacuaccauccu

SEQ ID NO: 876 - RNA, 15 nt, Artificial Sequence
  Description of Artificial Sequence:  Nucleic Acid Target
cuaccauccugggca

SEQ ID NO: 877 - RNA, 15 nt, Artificial Sequence
  Description of Artificial Sequence:  Nucleic Acid Target
ugggcaucggcacag

SEQ ID NO: 878 - RNA, 15 nt, Artificial Sequence
  Description of Artificial Sequence:  Nucleic Acid Target
caccgcuacgccucc

SEQ ID NO: 879 - RNA, 15 nt, Artificial Sequence
  Description of Artificial Sequence:  Nucleic Acid Target
uacgccuccgggauc

SEQ ID NO: 880 - RNA, 15 nt, Artificial Sequence
  Description of Artificial Sequence:  Nucleic Acid Target
ccgggaucgguuacc

SEQ ID NO: 881 - RNA, 15 nt, Artificial Sequence
  Description of Artificial Sequence:  Nucleic Acid Target
gaucgguuaccgugc

SEQ ID NO: 882 - RNA, 15 nt, Artificial Sequence
  Description of Artificial Sequence:  Nucleic Acid Target
aucgguuaccgugcc

SEQ ID NO: 883 - RNA, 15 nt, Artificial Sequence
  Description of Artificial Sequence:  Nucleic Acid Target
caaauauugaggagg

SEQ ID NO: 884 - RNA, 15 nt, Artificial Sequence
  Description of Artificial Sequence:  Nucleic Acid Target
gguggcucuguccaa

SEQ ID NO: 885 - RNA, 15 nt, Artificial Sequence
  Description of Artificial Sequence:  Nucleic Acid Target
auccccuucuauggc

SEQ ID NO: 886 - RNA, 15 nt, Artificial Sequence
  Description of Artificial Sequence:  Nucleic Acid Target
uccccuucuauggca

SEQ ID NO: 887 - RNA, 15 nt, Artificial Sequence
  Description of Artificial Sequence:  Nucleic Acid Target
cccuucuauggcaag

SEQ ID NO: 888 - RNA, 15 nt, Artificial Sequence
  Description of Artificial Sequence:  Nucleic Acid Target
aaggcaucucauuuu

SEQ ID NO: 889 - RNA, 15 nt, Artificial Sequence
  Description of Artificial Sequence:  Nucleic Acid Target
ggcaucucauuuucu

SEQ ID NO: 890 - RNA, 15 nt, Artificial Sequence
  Description of Artificial Sequence:  Nucleic Acid Target
aucucauuuucugcc

SEQ ID NO: 891 - RNA, 15 nt, Artificial Sequence
  Description of Artificial Sequence:  Nucleic Acid Target
ucucauuuucugcca

SEQ ID NO: 892 - RNA, 15 nt, Artificial Sequence
  Description of Artificial Sequence:  Nucleic Acid Target
cucauuuucugccac

SEQ ID NO: 893 - RNA, 15 nt, Artificial Sequence
  Description of Artificial Sequence:  Nucleic Acid Target
ucauuuucugccacu

SEQ ID NO: 894 - RNA, 15 nt, Artificial Sequence
  Description of Artificial Sequence:  Nucleic Acid Target
augagcucgccgcaa

SEQ ID NO: 895 - RNA, 15 nt, Artificial Sequence
  Description of Artificial Sequence:  Nucleic Acid Target
aagcugucaggccuc

SEQ ID NO: 896 - RNA, 15 nt, Artificial Sequence
  Description of Artificial Sequence:  Nucleic Acid Target
caggccucggaauca

SEQ ID NO: 897 - RNA, 15 nt, Artificial Sequence
  Description of Artificial Sequence:  Nucleic Acid Target
ccggggucuugacgu

SEQ ID NO: 898 - RNA, 15 nt, Artificial Sequence
  Description of Artificial Sequence:  Nucleic Acid Target
ggggucuugacgugu

SEQ ID NO: 899 - RNA, 15 nt, Artificial Sequence
  Description of Artificial Sequence:  Nucleic Acid Target
gacguguccgucaua

SEQ ID NO: 900 - RNA, 15 nt, Artificial Sequence
  Description of Artificial Sequence:  Nucleic Acid Target
gagaugucguuaucg

SEQ ID NO: 901 - RNA, 15 nt, Artificial Sequence
  Description of Artificial Sequence:  Nucleic Acid Target
augucguuaucgugg

SEQ ID NO: 902 - RNA, 15 nt, Artificial Sequence
  Description of Artificial Sequence:  Nucleic Acid Target
ugucguuaucguggc

SEQ ID NO: 903 - RNA, 15 nt, Artificial Sequence
  Description of Artificial Sequence:  Nucleic Acid Target
ucguuaucguggcaa

SEQ ID NO: 904 - RNA, 15 nt, Artificial Sequence
  Description of Artificial Sequence:  Nucleic Acid Target
agacgcucuaaugac

SEQ ID NO: 905 - RNA, 15 nt, Artificial Sequence
  Description of Artificial Sequence:  Nucleic Acid Target
acgcucuaaugacgg

SEQ ID NO: 906 - RNA, 15 nt, Artificial Sequence
  Description of Artificial Sequence:  Nucleic Acid Target
ggugacuuugacucg

SEQ ID NO: 907 - RNA, 15 nt, Artificial Sequence
  Description of Artificial Sequence:  Nucleic Acid Target
gugacuuugacucgg

SEQ ID NO: 908 - RNA, 15 nt, Artificial Sequence
  Description of Artificial Sequence:  Nucleic Acid Target
uuugacucggugauc

SEQ ID NO: 909 - RNA, 15 nt, Artificial Sequence
  Description of Artificial Sequence:  Nucleic Acid Target
caugugucacccaga

SEQ ID NO: 910 - RNA, 15 nt, Artificial Sequence
  Description of Artificial Sequence:  Nucleic Acid Target
agacagucgauuuca

SEQ ID NO: 911 - RNA, 15 nt, Artificial Sequence
  Description of Artificial Sequence:  Nucleic Acid Target
agucgauuucagcuu

SEQ ID NO: 912 - RNA, 15 nt, Artificial Sequence
  Description of Artificial Sequence:  Nucleic Acid Target
gucgauuucagcuug

SEQ ID NO: 913 - RNA, 15 nt, Artificial Sequence
  Description of Artificial Sequence:  Nucleic Acid Target
ucgauuucagcuugg

SEQ ID NO: 914 - RNA, 15 nt, Artificial Sequence
  Description of Artificial Sequence:  Nucleic Acid Target
uucagcuuggauccc

SEQ ID NO: 915 - RNA, 15 nt, Artificial Sequence
  Description of Artificial Sequence:  Nucleic Acid Target
cuuggaucccaccuu

SEQ ID NO: 916 - RNA, 15 nt, Artificial Sequence
  Description of Artificial Sequence:  Nucleic Acid Target
cccaccuuuaccauu

SEQ ID NO: 917 - RNA, 15 nt, Artificial Sequence
  Description of Artificial Sequence:  Nucleic Acid Target
ccaccuuuaccauug

SEQ ID NO: 918 - RNA, 15 nt, Artificial Sequence
  Description of Artificial Sequence:  Nucleic Acid Target
caccuuuaccauuga

SEQ ID NO: 919 - RNA, 15 nt, Artificial Sequence
  Description of Artificial Sequence:  Nucleic Acid Target
uuaccauugagacga

SEQ ID NO: 920 - RNA, 15 nt, Artificial Sequence
  Description of Artificial Sequence:  Nucleic Acid Target
cagggguaggggagg

SEQ ID NO: 921 - RNA, 15 nt, Artificial Sequence
  Description of Artificial Sequence:  Nucleic Acid Target
gaggcaucuacaggu

SEQ ID NO: 922 - RNA, 15 nt, Artificial Sequence
  Description of Artificial Sequence:  Nucleic Acid Target
ggcaucuacagguuu

SEQ ID NO: 923 - RNA, 15 nt, Artificial Sequence
  Description of Artificial Sequence:  Nucleic Acid Target
uacagguuugugacu

SEQ ID NO: 924 - RNA, 15 nt, Artificial Sequence
  Description of Artificial Sequence:  Nucleic Acid Target
acagguuugugacuc

SEQ ID NO: 925 - RNA, 15 nt, Artificial Sequence
  Description of Artificial Sequence:  Nucleic Acid Target
ugugacuccgggaga

SEQ ID NO: 926 - RNA, 15 nt, Artificial Sequence
  Description of Artificial Sequence:  Nucleic Acid Target
cggcccucgggcaug

SEQ ID NO: 927 - RNA, 15 nt, Artificial Sequence
  Description of Artificial Sequence:  Nucleic Acid Target
ggcauguucgauucu

SEQ ID NO: 928 - RNA, 15 nt, Artificial Sequence
  Description of Artificial Sequence:  Nucleic Acid Target
gcauguucgauucuu

SEQ ID NO: 929 - RNA, 15 nt, Artificial Sequence
  Description of Artificial Sequence:  Nucleic Acid Target
guucgauucuucggu

SEQ ID NO: 930 - RNA, 15 nt, Artificial Sequence
  Description of Artificial Sequence:  Nucleic Acid Target
uucgauucuucgguc

SEQ ID NO: 931 - RNA, 15 nt, Artificial Sequence
  Description of Artificial Sequence:  Nucleic Acid Target
cgauucuucgguccu

SEQ ID NO: 932 - RNA, 15 nt, Artificial Sequence
  Description of Artificial Sequence:  Nucleic Acid Target
gauucuucgguccug

SEQ ID NO: 933 - RNA, 15 nt, Artificial Sequence
  Description of Artificial Sequence:  Nucleic Acid Target
cuucgguccugugug

SEQ ID NO: 934 - RNA, 15 nt, Artificial Sequence
  Description of Artificial Sequence:  Nucleic Acid Target
gagugcuaugacgcg

SEQ ID NO: 935 - RNA, 15 nt, Artificial Sequence
  Description of Artificial Sequence:  Nucleic Acid Target
cuggaguucugggaa

SEQ ID NO: 936 - RNA, 15 nt, Artificial Sequence
  Description of Artificial Sequence:  Nucleic Acid Target
uggaguucugggaaa

SEQ ID NO: 937 - RNA, 15 nt, Artificial Sequence
  Description of Artificial Sequence:  Nucleic Acid Target
aaagcgucuucacag

SEQ ID NO: 938 - RNA, 15 nt, Artificial Sequence
  Description of Artificial Sequence:  Nucleic Acid Target
agcgucuucacaggc

SEQ ID NO: 939 - RNA, 15 nt, Artificial Sequence
  Description of Artificial Sequence:  Nucleic Acid Target
gcgucuucacaggcc

SEQ ID NO: 940 - RNA, 15 nt, Artificial Sequence
  Description of Artificial Sequence:  Nucleic Acid Target
caggccucacccaca

SEQ ID NO: 941 - RNA, 15 nt, Artificial Sequence
  Description of Artificial Sequence:  Nucleic Acid Target
cccacauagaugccc

SEQ ID NO: 942 - RNA, 15 nt, Artificial Sequence
  Description of Artificial Sequence:  Nucleic Acid Target
gcccacuuccugucc

SEQ ID NO: 943 - RNA, 15 nt, Artificial Sequence
  Description of Artificial Sequence:  Nucleic Acid Target
cccacuuccuguccc

SEQ ID NO: 944 - RNA, 15 nt, Artificial Sequence
  Description of Artificial Sequence:  Nucleic Acid Target
uuccugucccaaacc

SEQ ID NO: 945 - RNA, 15 nt, Artificial Sequence
  Description of Artificial Sequence:  Nucleic Acid Target
gacaacuucccuuac

SEQ ID NO: 946 - RNA, 15 nt, Artificial Sequence
  Description of Artificial Sequence:  Nucleic Acid Target
acaacuucccuuacc

SEQ ID NO: 947 - RNA, 15 nt, Artificial Sequence
  Description of Artificial Sequence:  Nucleic Acid Target
cuucccuuaccuggu

SEQ ID NO: 948 - RNA, 15 nt, Artificial Sequence
  Description of Artificial Sequence:  Nucleic Acid Target
uucccuuaccuggua

SEQ ID NO: 949 - RNA, 15 nt, Artificial Sequence
  Description of Artificial Sequence:  Nucleic Acid Target
ucaggcuccaccucc

SEQ ID NO: 950 - RNA, 15 nt, Artificial Sequence
  Description of Artificial Sequence:  Nucleic Acid Target
uccaccuccaucgug

SEQ ID NO: 951 - RNA, 15 nt, Artificial Sequence
  Description of Artificial Sequence:  Nucleic Acid Target
ccuccaucgugggau

SEQ ID NO: 952 - RNA, 15 nt, Artificial Sequence
  Description of Artificial Sequence:  Nucleic Acid Target
gugggaucaaaugug

SEQ ID NO: 953 - RNA, 15 nt, Artificial Sequence
  Description of Artificial Sequence:  Nucleic Acid Target
gaagugucucauacg

SEQ ID NO: 954 - RNA, 15 nt, Artificial Sequence
  Description of Artificial Sequence:  Nucleic Acid Target
agugucucauacggc

SEQ ID NO: 955 - RNA, 15 nt, Artificial Sequence
  Description of Artificial Sequence:  Nucleic Acid Target
gucucauacggcuua

SEQ ID NO: 956 - RNA, 15 nt, Artificial Sequence
  Description of Artificial Sequence:  Nucleic Acid Target
uacggcuuaaaccua

SEQ ID NO: 957 - RNA, 15 nt, Artificial Sequence
  Description of Artificial Sequence:  Nucleic Acid Target
acggcuuaaaccuac

SEQ ID NO: 958 - RNA, 15 nt, Artificial Sequence
  Description of Artificial Sequence:  Nucleic Acid Target
uaaaccuacgcugca

SEQ ID NO: 959 - RNA, 15 nt, Artificial Sequence
  Description of Artificial Sequence:  Nucleic Acid Target
auaggcuaggagccg

SEQ ID NO: 960 - RNA, 15 nt, Artificial Sequence
  Description of Artificial Sequence:  Nucleic Acid Target
gagccguucaaaaug

SEQ ID NO: 961 - RNA, 15 nt, Artificial Sequence
  Description of Artificial Sequence:  Nucleic Acid Target
agccguucaaaauga

SEQ ID NO: 962 - RNA, 15 nt, Artificial Sequence
  Description of Artificial Sequence:  Nucleic Acid Target
augagaucacccuca

SEQ ID NO: 963 - RNA, 15 nt, Artificial Sequence
  Description of Artificial Sequence:  Nucleic Acid Target
ucacccucacacauc

SEQ ID NO: 964 - RNA, 15 nt, Artificial Sequence
  Description of Artificial Sequence:  Nucleic Acid Target
cacacaucccauaac

SEQ ID NO: 965 - RNA, 15 nt, Artificial Sequence
  Description of Artificial Sequence:  Nucleic Acid Target
aucccauaaccaaau

SEQ ID NO: 966 - RNA, 15 nt, Artificial Sequence
  Description of Artificial Sequence:  Nucleic Acid Target
accaaauucaucaug

SEQ ID NO: 967 - RNA, 15 nt, Artificial Sequence
  Description of Artificial Sequence:  Nucleic Acid Target
ccaaauucaucaugg

SEQ ID NO: 968 - RNA, 15 nt, Artificial Sequence
  Description of Artificial Sequence:  Nucleic Acid Target
aauucaucauggcau

SEQ ID NO: 969 - RNA, 15 nt, Artificial Sequence
  Description of Artificial Sequence:  Nucleic Acid Target
ugcaugucggccgac

SEQ ID NO: 970 - RNA, 15 nt, Artificial Sequence
  Description of Artificial Sequence:  Nucleic Acid Target
ugcagcucuggccgc

SEQ ID NO: 971 - RNA, 15 nt, Artificial Sequence
  Description of Artificial Sequence:  Nucleic Acid Target
guguggucauugugg

SEQ ID NO: 972 - RNA, 15 nt, Artificial Sequence
  Description of Artificial Sequence:  Nucleic Acid Target
uggucauugugggua

SEQ ID NO: 973 - RNA, 15 nt, Artificial Sequence
  Description of Artificial Sequence:  Nucleic Acid Target
uguggguaggaucau

SEQ ID NO: 974 - RNA, 15 nt, Artificial Sequence
  Description of Artificial Sequence:  Nucleic Acid Target
ggaucauuuuguccg

SEQ ID NO: 975 - RNA, 15 nt, Artificial Sequence
  Description of Artificial Sequence:  Nucleic Acid Target
gaucauuuuguccgg

SEQ ID NO: 976 - RNA, 15 nt, Artificial Sequence
  Description of Artificial Sequence:  Nucleic Acid Target
aucauuuuguccggg

SEQ ID NO: 977 - RNA, 15 nt, Artificial Sequence
  Description of Artificial Sequence:  Nucleic Acid Target
auuuuguccgggagg

SEQ ID NO: 978 - RNA, 15 nt, Artificial Sequence
  Description of Artificial Sequence:  Nucleic Acid Target
gggaaguccucuacc

SEQ ID NO: 979 - RNA, 15 nt, Artificial Sequence
  Description of Artificial Sequence:  Nucleic Acid Target
aaguccucuaccggg

SEQ ID NO: 980 - RNA, 15 nt, Artificial Sequence
  Description of Artificial Sequence:  Nucleic Acid Target
guccucuaccgggag

SEQ ID NO: 981 - RNA, 15 nt, Artificial Sequence
  Description of Artificial Sequence:  Nucleic Acid Target
cgggaguucgaugaa

SEQ ID NO: 982 - RNA, 15 nt, Artificial Sequence
  Description of Artificial Sequence:  Nucleic Acid Target
gggaguucgaugaaa

SEQ ID NO: 983 - RNA, 15 nt, Artificial Sequence
  Description of Artificial Sequence:  Nucleic Acid Target
ugcgccucacaccuc

SEQ ID NO: 984 - RNA, 15 nt, Artificial Sequence
  Description of Artificial Sequence:  Nucleic Acid Target
cacaccucccuuaca

SEQ ID NO: 985 - RNA, 15 nt, Artificial Sequence
  Description of Artificial Sequence:  Nucleic Acid Target
ccucccuuacaucga

SEQ ID NO: 986 - RNA, 15 nt, Artificial Sequence
  Description of Artificial Sequence:  Nucleic Acid Target
cucccuuacaucgaa

SEQ ID NO: 987 - RNA, 15 nt, Artificial Sequence
  Description of Artificial Sequence:  Nucleic Acid Target
cuuacaucgaacagg

SEQ ID NO: 988 - RNA, 15 nt, Artificial Sequence
  Description of Artificial Sequence:  Nucleic Acid Target
ugcagcucgccgagc

SEQ ID NO: 989 - RNA, 15 nt, Artificial Sequence
  Description of Artificial Sequence:  Nucleic Acid Target
aggcacucggguugc

SEQ ID NO: 990 - RNA, 15 nt, Artificial Sequence
  Description of Artificial Sequence:  Nucleic Acid Target
cucggguugcugcaa

SEQ ID NO: 991 - RNA, 15 nt, Artificial Sequence
  Description of Artificial Sequence:  Nucleic Acid Target
uggaacuucaucagc

SEQ ID NO: 992 - RNA, 15 nt, Artificial Sequence
  Description of Artificial Sequence:  Nucleic Acid Target
ggaacuucaucagcg

SEQ ID NO: 993 - RNA, 15 nt, Artificial Sequence
  Description of Artificial Sequence:  Nucleic Acid Target
acuucaucagcggga

SEQ ID NO: 994 - RNA, 15 nt, Artificial Sequence
  Description of Artificial Sequence:  Nucleic Acid Target
gcgggauacaguauu

SEQ ID NO: 995 - RNA, 15 nt, Artificial Sequence
  Description of Artificial Sequence:  Nucleic Acid Target
auacaguauuuagca

SEQ ID NO: 996 - RNA, 15 nt, Artificial Sequence
  Description of Artificial Sequence:  Nucleic Acid Target
acaguauuuagcagg

SEQ ID NO: 997 - RNA, 15 nt, Artificial Sequence
  Description of Artificial Sequence:  Nucleic Acid Target
caguauuuagcaggc

SEQ ID NO: 998 - RNA, 15 nt, Artificial Sequence
  Description of Artificial Sequence:  Nucleic Acid Target
aguauuuagcaggcu

SEQ ID NO: 999 - RNA, 15 nt, Artificial Sequence
  Description of Artificial Sequence:  Nucleic Acid Target
ggcuuauccacucug

SEQ ID NO: 1000 - RNA, 15 nt, Artificial Sequence
  Description of Artificial Sequence:  Nucleic Acid Target
auccacucugccugg

SEQ ID NO: 1001 - RNA, 15 nt, Artificial Sequence
  Description of Artificial Sequence:  Nucleic Acid Target
ccgcgauagcaucac

SEQ ID NO: 1002 - RNA, 15 nt, Artificial Sequence
  Description of Artificial Sequence:  Nucleic Acid Target
auagcaucacugaug

SEQ ID NO: 1003 - RNA, 15 nt, Artificial Sequence
  Description of Artificial Sequence:  Nucleic Acid Target
auggcauucacagcc

SEQ ID NO: 1004 - RNA, 15 nt, Artificial Sequence
  Description of Artificial Sequence:  Nucleic Acid Target
uggcauucacagccu

SEQ ID NO: 1005 - RNA, 15 nt, Artificial Sequence
  Description of Artificial Sequence:  Nucleic Acid Target
acagccucuaucacc

SEQ ID NO: 1006 - RNA, 15 nt, Artificial Sequence
  Description of Artificial Sequence:  Nucleic Acid Target
agccucuaucaccag

SEQ ID NO: 1007 - RNA, 15 nt, Artificial Sequence
  Description of Artificial Sequence:  Nucleic Acid Target
ccucuaucaccaguc

SEQ ID NO: 1008 - RNA, 15 nt, Artificial Sequence
  Description of Artificial Sequence:  Nucleic Acid Target
caccaguccgcucac

SEQ ID NO: 1009 - RNA, 15 nt, Artificial Sequence
  Description of Artificial Sequence:  Nucleic Acid Target
guccgcucaccaccc

SEQ ID NO: 1010 - RNA, 15 nt, Artificial Sequence
  Description of Artificial Sequence:  Nucleic Acid Target
ccagaauacccuccu

SEQ ID NO: 1011 - RNA, 15 nt, Artificial Sequence
  Description of Artificial Sequence:  Nucleic Acid Target
auacccuccuguuca

SEQ ID NO: 1012 - RNA, 15 nt, Artificial Sequence
  Description of Artificial Sequence:  Nucleic Acid Target
ucaacaucuuagggg

SEQ ID NO: 1013 - RNA, 15 nt, Artificial Sequence
  Description of Artificial Sequence:  Nucleic Acid Target
aacaucuuaggggga

SEQ ID NO: 1014 - RNA, 15 nt, Artificial Sequence
  Description of Artificial Sequence:  Nucleic Acid Target
acaucuuagggggau

SEQ ID NO: 1015 - RNA, 15 nt, Artificial Sequence
  Description of Artificial Sequence:  Nucleic Acid Target
ggcugcucaacucgc

SEQ ID NO: 1016 - RNA, 15 nt, Artificial Sequence
  Description of Artificial Sequence:  Nucleic Acid Target
cgcuccucccagugc

SEQ ID NO: 1017 - RNA, 15 nt, Artificial Sequence
  Description of Artificial Sequence:  Nucleic Acid Target
ugcugcuucggccuu

SEQ ID NO: 1018 - RNA, 15 nt, Artificial Sequence
  Description of Artificial Sequence:  Nucleic Acid Target
aggugcuuguggaca

SEQ ID NO: 1019 - RNA, 15 nt, Artificial Sequence
  Description of Artificial Sequence:  Nucleic Acid Target
uggacauucuggcgg

SEQ ID NO: 1020 - RNA, 15 nt, Artificial Sequence
  Description of Artificial Sequence:  Nucleic Acid Target
ggacauucuggcggg

SEQ ID NO: 1021 - RNA, 15 nt, Artificial Sequence
  Description of Artificial Sequence:  Nucleic Acid Target
guuaacuugcucccu

SEQ ID NO: 1022 - RNA, 15 nt, Artificial Sequence
  Description of Artificial Sequence:  Nucleic Acid Target
cugccauccucuccc

SEQ ID NO: 1023 - RNA, 15 nt, Artificial Sequence
  Description of Artificial Sequence:  Nucleic Acid Target
ccauccucucccccg

SEQ ID NO: 1024 - RNA, 15 nt, Artificial Sequence
  Description of Artificial Sequence:  Nucleic Acid Target
ggcugauagcguucg

SEQ ID NO: 1025 - RNA, 15 nt, Artificial Sequence
  Description of Artificial Sequence:  Nucleic Acid Target
uucgcuucgcggggu

SEQ ID NO: 1026 - RNA, 15 nt, Artificial Sequence
  Description of Artificial Sequence:  Nucleic Acid Target
gcgggguaaccacgu

SEQ ID NO: 1027 - RNA, 15 nt, Artificial Sequence
  Description of Artificial Sequence:  Nucleic Acid Target
accacguuuccccca

SEQ ID NO: 1028 - RNA, 15 nt, Artificial Sequence
  Description of Artificial Sequence:  Nucleic Acid Target
ccacguuucccccac

SEQ ID NO: 1029 - RNA, 15 nt, Artificial Sequence
  Description of Artificial Sequence:  Nucleic Acid Target
cacguuucccccacg

SEQ ID NO: 1030 - RNA, 15 nt, Artificial Sequence
  Description of Artificial Sequence:  Nucleic Acid Target
acgcacuacgugccu

SEQ ID NO: 1031 - RNA, 15 nt, Artificial Sequence
  Description of Artificial Sequence:  Nucleic Acid Target
cacguguaacucaga

SEQ ID NO: 1032 - RNA, 15 nt, Artificial Sequence
  Description of Artificial Sequence:  Nucleic Acid Target
uguaacucagauccu

SEQ ID NO: 1033 - RNA, 15 nt, Artificial Sequence
  Description of Artificial Sequence:  Nucleic Acid Target
cucagauccucucca

SEQ ID NO: 1034 - RNA, 15 nt, Artificial Sequence
  Description of Artificial Sequence:  Nucleic Acid Target
agauccucuccagcc

SEQ ID NO: 1035 - RNA, 15 nt, Artificial Sequence
  Description of Artificial Sequence:  Nucleic Acid Target
auccucuccagccuc

SEQ ID NO: 1036 - RNA, 15 nt, Artificial Sequence
  Description of Artificial Sequence:  Nucleic Acid Target
ccagccucaccauca

SEQ ID NO: 1037 - RNA, 15 nt, Artificial Sequence
  Description of Artificial Sequence:  Nucleic Acid Target
ucaccaucacucagc

SEQ ID NO: 1038 - RNA, 15 nt, Artificial Sequence
  Description of Artificial Sequence:  Nucleic Acid Target
caucacucagcugcu

SEQ ID NO: 1039 - RNA, 15 nt, Artificial Sequence
  Description of Artificial Sequence:  Nucleic Acid Target
agaggcuucaccagu

SEQ ID NO: 1040 - RNA, 15 nt, Artificial Sequence
  Description of Artificial Sequence:  Nucleic Acid Target
gaggcuucaccagug

SEQ ID NO: 1041 - RNA, 15 nt, Artificial Sequence
  Description of Artificial Sequence:  Nucleic Acid Target
aguggauuaaugagg

SEQ ID NO: 1042 - RNA, 15 nt, Artificial Sequence
  Description of Artificial Sequence:  Nucleic Acid Target
guggauuaaugagga

SEQ ID NO: 1043 - RNA, 15 nt, Artificial Sequence
  Description of Artificial Sequence:  Nucleic Acid Target
gacugcuccacgcca

SEQ ID NO: 1044 - RNA, 15 nt, Artificial Sequence
  Description of Artificial Sequence:  Nucleic Acid Target
ccaugcuccggcucg

SEQ ID NO: 1045 - RNA, 15 nt, Artificial Sequence
  Description of Artificial Sequence:  Nucleic Acid Target
uccggcucguggcua

SEQ ID NO: 1046 - RNA, 15 nt, Artificial Sequence
  Description of Artificial Sequence:  Nucleic Acid Target
cguggcuaaaggaug

SEQ ID NO: 1047 - RNA, 15 nt, Artificial Sequence
  Description of Artificial Sequence:  Nucleic Acid Target
aggauguuugggacu

SEQ ID NO: 1048 - RNA, 15 nt, Artificial Sequence
  Description of Artificial Sequence:  Nucleic Acid Target
ggauguuugggacug

SEQ ID NO: 1049 - RNA, 15 nt, Artificial Sequence
  Description of Artificial Sequence:  Nucleic Acid Target
acuggauaugcacgg

SEQ ID NO: 1050 - RNA, 15 nt, Artificial Sequence
  Description of Artificial Sequence:  Nucleic Acid Target
acgguguugacugac

SEQ ID NO: 1051 - RNA, 15 nt, Artificial Sequence
  Description of Artificial Sequence:  Nucleic Acid Target
acugacuucaagacc

SEQ ID NO: 1052 - RNA, 15 nt, Artificial Sequence
  Description of Artificial Sequence:  Nucleic Acid Target
cugacuucaagaccu

SEQ ID NO: 1053 - RNA, 15 nt, Artificial Sequence
  Description of Artificial Sequence:  Nucleic Acid Target
ccuggcuccagucca

SEQ ID NO: 1054 - RNA, 15 nt, Artificial Sequence
  Description of Artificial Sequence:  Nucleic Acid Target
cuccaguccaagcuc

SEQ ID NO: 1055 - RNA, 15 nt, Artificial Sequence
  Description of Artificial Sequence:  Nucleic Acid Target
ccaagcuccugccga

SEQ ID NO: 1056 - RNA, 15 nt, Artificial Sequence
  Description of Artificial Sequence:  Nucleic Acid Target
ccgaaauugccggga

SEQ ID NO: 1057 - RNA, 15 nt, Artificial Sequence
  Description of Artificial Sequence:  Nucleic Acid Target
cgggagucccuuucu

SEQ ID NO: 1058 - RNA, 15 nt, Artificial Sequence
  Description of Artificial Sequence:  Nucleic Acid Target
agucccuuucuucuc

SEQ ID NO: 1059 - RNA, 15 nt, Artificial Sequence
  Description of Artificial Sequence:  Nucleic Acid Target
gucccuuucuucuca

SEQ ID NO: 1060 - RNA, 15 nt, Artificial Sequence
  Description of Artificial Sequence:  Nucleic Acid Target
ucccuuucuucucau

SEQ ID NO: 1061 - RNA, 15 nt, Artificial Sequence
  Description of Artificial Sequence:  Nucleic Acid Target
ccuuucuucucaugc

SEQ ID NO: 1062 - RNA, 15 nt, Artificial Sequence
  Description of Artificial Sequence:  Nucleic Acid Target
cuuucuucucaugcc

SEQ ID NO: 1063 - RNA, 15 nt, Artificial Sequence
  Description of Artificial Sequence:  Nucleic Acid Target
uucuucucaugccaa

SEQ ID NO: 1064 - RNA, 15 nt, Artificial Sequence
  Description of Artificial Sequence:  Nucleic Acid Target
cgcggguacaaggga

SEQ ID NO: 1065 - RNA, 15 nt, Artificial Sequence
  Description of Artificial Sequence:  Nucleic Acid Target
agggagucuggcggg

SEQ ID NO: 1066 - RNA, 15 nt, Artificial Sequence
  Description of Artificial Sequence:  Nucleic Acid Target
cacaaauuaccggac

SEQ ID NO: 1067 - RNA, 15 nt, Artificial Sequence
  Description of Artificial Sequence:  Nucleic Acid Target
acaaauuaccggaca

SEQ ID NO: 1068 - RNA, 15 nt, Artificial Sequence
  Description of Artificial Sequence:  Nucleic Acid Target
gacaugucaaaaacg

SEQ ID NO: 1069 - RNA, 15 nt, Artificial Sequence
  Description of Artificial Sequence:  Nucleic Acid Target
aaacgguuccaugag

SEQ ID NO: 1070 - RNA, 15 nt, Artificial Sequence
  Description of Artificial Sequence:  Nucleic Acid Target
aacgguuccaugagg

SEQ ID NO: 1071 - RNA, 15 nt, Artificial Sequence
  Description of Artificial Sequence:  Nucleic Acid Target
ugaggaucguugggc

SEQ ID NO: 1072 - RNA, 15 nt, Artificial Sequence
  Description of Artificial Sequence:  Nucleic Acid Target
ggaucguugggccua

SEQ ID NO: 1073 - RNA, 15 nt, Artificial Sequence
  Description of Artificial Sequence:  Nucleic Acid Target
ugggccuaaaaccug

SEQ ID NO: 1074 - RNA, 15 nt, Artificial Sequence
  Description of Artificial Sequence:  Nucleic Acid Target
ggaacguuccccauc

SEQ ID NO: 1075 - RNA, 15 nt, Artificial Sequence
  Description of Artificial Sequence:  Nucleic Acid Target
gaacguuccccauca

SEQ ID NO: 1076 - RNA, 15 nt, Artificial Sequence
  Description of Artificial Sequence:  Nucleic Acid Target
uccccaucaacgcgu

SEQ ID NO: 1077 - RNA, 15 nt, Artificial Sequence
  Description of Artificial Sequence:  Nucleic Acid Target
aacgcguacaccaca

SEQ ID NO: 1078 - RNA, 15 nt, Artificial Sequence
  Description of Artificial Sequence:  Nucleic Acid Target
acacccuccccggcg

SEQ ID NO: 1079 - RNA, 15 nt, Artificial Sequence
  Description of Artificial Sequence:  Nucleic Acid Target
gaagaguacguggag

SEQ ID NO: 1080 - RNA, 15 nt, Artificial Sequence
  Description of Artificial Sequence:  Nucleic Acid Target
uggagauuacgcggg

SEQ ID NO: 1081 - RNA, 15 nt, Artificial Sequence
  Description of Artificial Sequence:  Nucleic Acid Target
ggagauuacgcgggu

SEQ ID NO: 1082 - RNA, 15 nt, Artificial Sequence
  Description of Artificial Sequence:  Nucleic Acid Target
gacggguaugaccac

SEQ ID NO: 1083 - RNA, 15 nt, Artificial Sequence
  Description of Artificial Sequence:  Nucleic Acid Target
gccaggucccggccc

SEQ ID NO: 1084 - RNA, 15 nt, Artificial Sequence
  Description of Artificial Sequence:  Nucleic Acid Target
gucacauuccagguc

SEQ ID NO: 1085 - RNA, 15 nt, Artificial Sequence
  Description of Artificial Sequence:  Nucleic Acid Target
cagugcucacuucca

SEQ ID NO: 1086 - RNA, 15 nt, Artificial Sequence
  Description of Artificial Sequence:  Nucleic Acid Target
gcucacuuccaugcu

SEQ ID NO: 1087 - RNA, 15 nt, Artificial Sequence
  Description of Artificial Sequence:  Nucleic Acid Target
cucacuuccaugcuc

SEQ ID NO: 1088 - RNA, 15 nt, Artificial Sequence
  Description of Artificial Sequence:  Nucleic Acid Target
ccaugcucaccgacc

SEQ ID NO: 1089 - RNA, 15 nt, Artificial Sequence
  Description of Artificial Sequence:  Nucleic Acid Target
gaccccucccacauu

SEQ ID NO: 1090 - RNA, 15 nt, Artificial Sequence
  Description of Artificial Sequence:  Nucleic Acid Target
cccacauuacagcag

SEQ ID NO: 1091 - RNA, 15 nt, Artificial Sequence
  Description of Artificial Sequence:  Nucleic Acid Target
ccacauuacagcaga

SEQ ID NO: 1092 - RNA, 15 nt, Artificial Sequence
  Description of Artificial Sequence:  Nucleic Acid Target
gacggcuaaacguag

SEQ ID NO: 1093 - RNA, 15 nt, Artificial Sequence
  Description of Artificial Sequence:  Nucleic Acid Target
cagcucuucagcuag

SEQ ID NO: 1094 - RNA, 15 nt, Artificial Sequence
  Description of Artificial Sequence:  Nucleic Acid Target
agcucuucagcuagc

SEQ ID NO: 1095 - RNA, 15 nt, Artificial Sequence
  Description of Artificial Sequence:  Nucleic Acid Target
uucagcuagccaauu

SEQ ID NO: 1096 - RNA, 15 nt, Artificial Sequence
  Description of Artificial Sequence:  Nucleic Acid Target
ugcgccuuccuugaa

SEQ ID NO: 1097 - RNA, 15 nt, Artificial Sequence
  Description of Artificial Sequence:  Nucleic Acid Target
gcgccuuccuugaag

SEQ ID NO: 1098 - RNA, 15 nt, Artificial Sequence
  Description of Artificial Sequence:  Nucleic Acid Target
ccuuccuugaaggca

SEQ ID NO: 1099 - RNA, 15 nt, Artificial Sequence
  Description of Artificial Sequence:  Nucleic Acid Target
augcacuacccacca

SEQ ID NO: 1100 - RNA, 15 nt, Artificial Sequence
  Description of Artificial Sequence:  Nucleic Acid Target
caugacuccccggac

SEQ ID NO: 1101 - RNA, 15 nt, Artificial Sequence
  Description of Artificial Sequence:  Nucleic Acid Target
cugaccucaucgagg

SEQ ID NO: 1102 - RNA, 15 nt, Artificial Sequence
  Description of Artificial Sequence:  Nucleic Acid Target
accucaucgaggcca

SEQ ID NO: 1103 - RNA, 15 nt, Artificial Sequence
  Description of Artificial Sequence:  Nucleic Acid Target
gaaacaucacccgug

SEQ ID NO: 1104 - RNA, 15 nt, Artificial Sequence
  Description of Artificial Sequence:  Nucleic Acid Target
guggagucagagaau

SEQ ID NO: 1105 - RNA, 15 nt, Artificial Sequence
  Description of Artificial Sequence:  Nucleic Acid Target
agagaauaagguggu

SEQ ID NO: 1106 - RNA, 15 nt, Artificial Sequence
  Description of Artificial Sequence:  Nucleic Acid Target
aggugguaauuuugg

SEQ ID NO: 1107 - RNA, 15 nt, Artificial Sequence
  Description of Artificial Sequence:  Nucleic Acid Target
ugguaauuuuggacu

SEQ ID NO: 1108 - RNA, 15 nt, Artificial Sequence
  Description of Artificial Sequence:  Nucleic Acid Target
gguaauuuuggacuc

SEQ ID NO: 1109 - RNA, 15 nt, Artificial Sequence
  Description of Artificial Sequence:  Nucleic Acid Target
guaauuuuggacucu

SEQ ID NO: 1110 - RNA, 15 nt, Artificial Sequence
  Description of Artificial Sequence:  Nucleic Acid Target
uuggacucuuucgac

SEQ ID NO: 1111 - RNA, 15 nt, Artificial Sequence
  Description of Artificial Sequence:  Nucleic Acid Target
ggacucuuucgaccc

SEQ ID NO: 1112 - RNA, 15 nt, Artificial Sequence
  Description of Artificial Sequence:  Nucleic Acid Target
gacucuuucgacccg

SEQ ID NO: 1113 - RNA, 15 nt, Artificial Sequence
  Description of Artificial Sequence:  Nucleic Acid Target
acucuuucgacccgc

SEQ ID NO: 1114 - RNA, 15 nt, Artificial Sequence
  Description of Artificial Sequence:  Nucleic Acid Target
gaaguauccguugca

SEQ ID NO: 1115 - RNA, 15 nt, Artificial Sequence
  Description of Artificial Sequence:  Nucleic Acid Target
uauccguugcagcag

SEQ ID NO: 1116 - RNA, 15 nt, Artificial Sequence
  Description of Artificial Sequence:  Nucleic Acid Target
cagagauccugcgaa

SEQ ID NO: 1117 - RNA, 15 nt, Artificial Sequence
  Description of Artificial Sequence:  Nucleic Acid Target
cgaaaauccaagaag

SEQ ID NO: 1118 - RNA, 15 nt, Artificial Sequence
  Description of Artificial Sequence:  Nucleic Acid Target
aagaaguuccccccc

SEQ ID NO: 1119 - RNA, 15 nt, Artificial Sequence
  Description of Artificial Sequence:  Nucleic Acid Target
agaaguucccccccg

SEQ ID NO: 1120 - RNA, 15 nt, Artificial Sequence
  Description of Artificial Sequence:  Nucleic Acid Target
caacccuccacuguu

SEQ ID NO: 1121 - RNA, 15 nt, Artificial Sequence
  Description of Artificial Sequence:  Nucleic Acid Target
uuagaguccuggaaa

SEQ ID NO: 1122 - RNA, 15 nt, Artificial Sequence
  Description of Artificial Sequence:  Nucleic Acid Target
gggcccuccaauacc

SEQ ID NO: 1123 - RNA, 15 nt, Artificial Sequence
  Description of Artificial Sequence:  Nucleic Acid Target
cuccaauaccgccuc

SEQ ID NO: 1124 - RNA, 15 nt, Artificial Sequence
  Description of Artificial Sequence:  Nucleic Acid Target
accgccuccacggaa

SEQ ID NO: 1125 - RNA, 15 nt, Artificial Sequence
  Description of Artificial Sequence:  Nucleic Acid Target
ggacgguuguucuga

SEQ ID NO: 1126 - RNA, 15 nt, Artificial Sequence
  Description of Artificial Sequence:  Nucleic Acid Target
cgguuguucugacag

SEQ ID NO: 1127 - RNA, 15 nt, Artificial Sequence
  Description of Artificial Sequence:  Nucleic Acid Target
gguuguucugacaga

SEQ ID NO: 1128 - RNA, 15 nt, Artificial Sequence
  Description of Artificial Sequence:  Nucleic Acid Target
accgugucuucugcc

SEQ ID NO: 1129 - RNA, 15 nt, Artificial Sequence
  Description of Artificial Sequence:  Nucleic Acid Target
cgugucuucugccuu

SEQ ID NO: 1130 - RNA, 15 nt, Artificial Sequence
  Description of Artificial Sequence:  Nucleic Acid Target
gugucuucugccuug

SEQ ID NO: 1131 - RNA, 15 nt, Artificial Sequence
  Description of Artificial Sequence:  Nucleic Acid Target
ucugccuuggcggag

SEQ ID NO: 1132 - RNA, 15 nt, Artificial Sequence
  Description of Artificial Sequence:  Nucleic Acid Target
ggcagcuccggaucg

SEQ ID NO: 1133 - RNA, 15 nt, Artificial Sequence
  Description of Artificial Sequence:  Nucleic Acid Target
cgccccucccgauca

SEQ ID NO: 1134 - RNA, 15 nt, Artificial Sequence
  Description of Artificial Sequence:  Nucleic Acid Target
ucccgaucagaccuc

SEQ ID NO: 1135 - RNA, 15 nt, Artificial Sequence
  Description of Artificial Sequence:  Nucleic Acid Target
cagaccucugacgac

SEQ ID NO: 1136 - RNA, 15 nt, Artificial Sequence
  Description of Artificial Sequence:  Nucleic Acid Target
aaagaaucugacguu

SEQ ID NO: 1137 - RNA, 15 nt, Artificial Sequence
  Description of Artificial Sequence:  Nucleic Acid Target
cugacguugagucgu

SEQ ID NO: 1138 - RNA, 15 nt, Artificial Sequence
  Description of Artificial Sequence:  Nucleic Acid Target
guugagucguacucc

SEQ ID NO: 1139 - RNA, 15 nt, Artificial Sequence
  Description of Artificial Sequence:  Nucleic Acid Target
gagucguacuccucc

SEQ ID NO: 1140 - RNA, 15 nt, Artificial Sequence
  Description of Artificial Sequence:  Nucleic Acid Target
auguccuacacaugg

SEQ ID NO: 1141 - RNA, 15 nt, Artificial Sequence
  Description of Artificial Sequence:  Nucleic Acid Target
cccugaucacgccau

SEQ ID NO: 1142 - RNA, 15 nt, Artificial Sequence
  Description of Artificial Sequence:  Nucleic Acid Target
aacgcguugagcaac

SEQ ID NO: 1143 - RNA, 15 nt, Artificial Sequence
  Description of Artificial Sequence:  Nucleic Acid Target
agcaacucucugcug

SEQ ID NO: 1144 - RNA, 15 nt, Artificial Sequence
  Description of Artificial Sequence:  Nucleic Acid Target
caacucucugcugcg

SEQ ID NO: 1145 - RNA, 15 nt, Artificial Sequence
  Description of Artificial Sequence:  Nucleic Acid Target
gcugcgucaccacaa

SEQ ID NO: 1146 - RNA, 15 nt, Artificial Sequence
  Description of Artificial Sequence:  Nucleic Acid Target
acauggucuaugcca

SEQ ID NO: 1147 - RNA, 15 nt, Artificial Sequence
  Description of Artificial Sequence:  Nucleic Acid Target
auggucuaugccaca

SEQ ID NO: 1148 - RNA, 15 nt, Artificial Sequence
  Description of Artificial Sequence:  Nucleic Acid Target
agaaggucaccuuug

SEQ ID NO: 1149 - RNA, 15 nt, Artificial Sequence
  Description of Artificial Sequence:  Nucleic Acid Target
gucaccuuugacaga

SEQ ID NO: 1150 - RNA, 15 nt, Artificial Sequence
  Description of Artificial Sequence:  Nucleic Acid Target
ucaccuuugacagac

SEQ ID NO: 1151 - RNA, 15 nt, Artificial Sequence
  Description of Artificial Sequence:  Nucleic Acid Target
acgugcucaaggaga

SEQ ID NO: 1152 - RNA, 15 nt, Artificial Sequence
  Description of Artificial Sequence:  Nucleic Acid Target
aaggcguccacaguu

SEQ ID NO: 1153 - RNA, 15 nt, Artificial Sequence
  Description of Artificial Sequence:  Nucleic Acid Target
ccacaguuaaggcua

SEQ ID NO: 1154 - RNA, 15 nt, Artificial Sequence
  Description of Artificial Sequence:  Nucleic Acid Target
cacaguuaaggcuaa

SEQ ID NO: 1155 - RNA, 15 nt, Artificial Sequence
  Description of Artificial Sequence:  Nucleic Acid Target
cuaaacuucuauccg

SEQ ID NO: 1156 - RNA, 15 nt, Artificial Sequence
  Description of Artificial Sequence:  Nucleic Acid Target
uaaacuucuauccgu

SEQ ID NO: 1157 - RNA, 15 nt, Artificial Sequence
  Description of Artificial Sequence:  Nucleic Acid Target
cccacauucggccaa

SEQ ID NO: 1158 - RNA, 15 nt, Artificial Sequence
  Description of Artificial Sequence:  Nucleic Acid Target
ccacauucggccaaa

SEQ ID NO: 1159 - RNA, 15 nt, Artificial Sequence
  Description of Artificial Sequence:  Nucleic Acid Target
aggacguccggaacc

SEQ ID NO: 1160 - RNA, 15 nt, Artificial Sequence
  Description of Artificial Sequence:  Nucleic Acid Target
ggaaccuauccagca

SEQ ID NO: 1161 - RNA, 15 nt, Artificial Sequence
  Description of Artificial Sequence:  Nucleic Acid Target
aaccuauccagcaag

SEQ ID NO: 1162 - RNA, 15 nt, Artificial Sequence
  Description of Artificial Sequence:  Nucleic Acid Target
aggccauuaaccaca

SEQ ID NO: 1163 - RNA, 15 nt, Artificial Sequence
  Description of Artificial Sequence:  Nucleic Acid Target
ggccauuaaccacau

SEQ ID NO: 1164 - RNA, 15 nt, Artificial Sequence
  Description of Artificial Sequence:  Nucleic Acid Target
caccaauugacacca

SEQ ID NO: 1165 - RNA, 15 nt, Artificial Sequence
  Description of Artificial Sequence:  Nucleic Acid Target
ccaccaucauggcaa

SEQ ID NO: 1166 - RNA, 15 nt, Artificial Sequence
  Description of Artificial Sequence:  Nucleic Acid Target
gugaaguuuucugcg

SEQ ID NO: 1167 - RNA, 15 nt, Artificial Sequence
  Description of Artificial Sequence:  Nucleic Acid Target
ugaaguuuucugcgu

SEQ ID NO: 1168 - RNA, 15 nt, Artificial Sequence
  Description of Artificial Sequence:  Nucleic Acid Target
gaaguuuucugcguc

SEQ ID NO: 1169 - RNA, 15 nt, Artificial Sequence
  Description of Artificial Sequence:  Nucleic Acid Target
aaguuuucugcgucc

SEQ ID NO: 1170 - RNA, 15 nt, Artificial Sequence
  Description of Artificial Sequence:  Nucleic Acid Target
ucugcguccaaccgg

SEQ ID NO: 1171 - RNA, 15 nt, Artificial Sequence
  Description of Artificial Sequence:  Nucleic Acid Target
gccagcucgccuuau

SEQ ID NO: 1172 - RNA, 15 nt, Artificial Sequence
  Description of Artificial Sequence:  Nucleic Acid Target
uuaucguauucccag

SEQ ID NO: 1173 - RNA, 15 nt, Artificial Sequence
  Description of Artificial Sequence:  Nucleic Acid Target
aucguauucccagac

SEQ ID NO: 1174 - RNA, 15 nt, Artificial Sequence
  Description of Artificial Sequence:  Nucleic Acid Target
ucguauucccagacc

SEQ ID NO: 1175 - RNA, 15 nt, Artificial Sequence
  Description of Artificial Sequence:  Nucleic Acid Target
ugggaguucguguau

SEQ ID NO: 1176 - RNA, 15 nt, Artificial Sequence
  Description of Artificial Sequence:  Nucleic Acid Target
gggaguucguguaug

SEQ ID NO: 1177 - RNA, 15 nt, Artificial Sequence
  Description of Artificial Sequence:  Nucleic Acid Target
uucguguaugcgaga

SEQ ID NO: 1178 - RNA, 15 nt, Artificial Sequence
  Description of Artificial Sequence:  Nucleic Acid Target
aauggcucuuuacga

SEQ ID NO: 1179 - RNA, 15 nt, Artificial Sequence
  Description of Artificial Sequence:  Nucleic Acid Target
uggcucuuuacgacg

SEQ ID NO: 1180 - RNA, 15 nt, Artificial Sequence
  Description of Artificial Sequence:  Nucleic Acid Target
ggcucuuuacgacgu

SEQ ID NO: 1181 - RNA, 15 nt, Artificial Sequence
  Description of Artificial Sequence:  Nucleic Acid Target
gcucuuuacgacgug

SEQ ID NO: 1182 - RNA, 15 nt, Artificial Sequence
  Description of Artificial Sequence:  Nucleic Acid Target
acguggucuccaccc

SEQ ID NO: 1183 - RNA, 15 nt, Artificial Sequence
  Description of Artificial Sequence:  Nucleic Acid Target
guggucuccacccuu

SEQ ID NO: 1184 - RNA, 15 nt, Artificial Sequence
  Description of Artificial Sequence:  Nucleic Acid Target
ccacccuuccucagg

SEQ ID NO: 1185 - RNA, 15 nt, Artificial Sequence
  Description of Artificial Sequence:  Nucleic Acid Target
cacccuuccucaggc

SEQ ID NO: 1186 - RNA, 15 nt, Artificial Sequence
  Description of Artificial Sequence:  Nucleic Acid Target
ccuuccucaggccgu

SEQ ID NO: 1187 - RNA, 15 nt, Artificial Sequence
  Description of Artificial Sequence:  Nucleic Acid Target
augggcuccucguac

SEQ ID NO: 1188 - RNA, 15 nt, Artificial Sequence
  Description of Artificial Sequence:  Nucleic Acid Target
ggcuccucguacgga

SEQ ID NO: 1189 - RNA, 15 nt, Artificial Sequence
  Description of Artificial Sequence:  Nucleic Acid Target
acggauuccaguacu

SEQ ID NO: 1190 - RNA, 15 nt, Artificial Sequence
  Description of Artificial Sequence:  Nucleic Acid Target
caguacucuccuggg

SEQ ID NO: 1191 - RNA, 15 nt, Artificial Sequence
  Description of Artificial Sequence:  Nucleic Acid Target
aagcccuaugggcuu

SEQ ID NO: 1192 - RNA, 15 nt, Artificial Sequence
  Description of Artificial Sequence:  Nucleic Acid Target
augggcuucucguau

SEQ ID NO: 1193 - RNA, 15 nt, Artificial Sequence
  Description of Artificial Sequence:  Nucleic Acid Target
ugggcuucucguaug

SEQ ID NO: 1194 - RNA, 15 nt, Artificial Sequence
  Description of Artificial Sequence:  Nucleic Acid Target
ggcuucucguaugac

SEQ ID NO: 1195 - RNA, 15 nt, Artificial Sequence
  Description of Artificial Sequence:  Nucleic Acid Target
uucucguaugacacc

SEQ ID NO: 1196 - RNA, 15 nt, Artificial Sequence
  Description of Artificial Sequence:  Nucleic Acid Target
cgcugcuuugacuca

SEQ ID NO: 1197 - RNA, 15 nt, Artificial Sequence
  Description of Artificial Sequence:  Nucleic Acid Target
gcugcuuugacucaa

SEQ ID NO: 1198 - RNA, 15 nt, Artificial Sequence
  Description of Artificial Sequence:  Nucleic Acid Target
uuugacucaacaguc

SEQ ID NO: 1199 - RNA, 15 nt, Artificial Sequence
  Description of Artificial Sequence:  Nucleic Acid Target
caacagucacugaga

SEQ ID NO: 1200 - RNA, 15 nt, Artificial Sequence
  Description of Artificial Sequence:  Nucleic Acid Target
gcgacauccguguug

SEQ ID NO: 1201 - RNA, 15 nt, Artificial Sequence
  Description of Artificial Sequence:  Nucleic Acid Target
uccguguugaggagu

SEQ ID NO: 1202 - RNA, 15 nt, Artificial Sequence
  Description of Artificial Sequence:  Nucleic Acid Target
gaggagucaaucuac

SEQ ID NO: 1203 - RNA, 15 nt, Artificial Sequence
  Description of Artificial Sequence:  Nucleic Acid Target
agucaaucuaccaau

SEQ ID NO: 1204 - RNA, 15 nt, Artificial Sequence
  Description of Artificial Sequence:  Nucleic Acid Target
ucaaucuaccaaugu

SEQ ID NO: 1205 - RNA, 15 nt, Artificial Sequence
  Description of Artificial Sequence:  Nucleic Acid Target
ccaauguugugacuu

SEQ ID NO: 1206 - RNA, 15 nt, Artificial Sequence
  Description of Artificial Sequence:  Nucleic Acid Target
ugugacuuggccccc

SEQ ID NO: 1207 - RNA, 15 nt, Artificial Sequence
  Description of Artificial Sequence:  Nucleic Acid Target
ccugacuaauucaaa

SEQ ID NO: 1208 - RNA, 15 nt, Artificial Sequence
  Description of Artificial Sequence:  Nucleic Acid Target
gacuaauucaaaagg

SEQ ID NO: 1209 - RNA, 15 nt, Artificial Sequence
  Description of Artificial Sequence:  Nucleic Acid Target
acuaauucaaaaggg

SEQ ID NO: 1210 - RNA, 15 nt, Artificial Sequence
  Description of Artificial Sequence:  Nucleic Acid Target
cggcaauacccucac

SEQ ID NO: 1211 - RNA, 15 nt, Artificial Sequence
  Description of Artificial Sequence:  Nucleic Acid Target
auacccucacaugcu

SEQ ID NO: 1212 - RNA, 15 nt, Artificial Sequence
  Description of Artificial Sequence:  Nucleic Acid Target
acaugcuacuugaaa

SEQ ID NO: 1213 - RNA, 15 nt, Artificial Sequence
  Description of Artificial Sequence:  Nucleic Acid Target
ugcuacuugaaagcc

SEQ ID NO: 1214 - RNA, 15 nt, Artificial Sequence
  Description of Artificial Sequence:  Nucleic Acid Target
ugucguuaucuguga

SEQ ID NO: 1215 - RNA, 15 nt, Artificial Sequence
  Description of Artificial Sequence:  Nucleic Acid Target
ucguuaucugugaaa

SEQ ID NO: 1216 - RNA, 15 nt, Artificial Sequence
  Description of Artificial Sequence:  Nucleic Acid Target
cgagccuacgagucu

SEQ ID NO: 1217 - RNA, 15 nt, Artificial Sequence
  Description of Artificial Sequence:  Nucleic Acid Target
uacgagucuucacgg

SEQ ID NO: 1218 - RNA, 15 nt, Artificial Sequence
  Description of Artificial Sequence:  Nucleic Acid Target
cgagucuucacggag

SEQ ID NO: 1219 - RNA, 15 nt, Artificial Sequence
  Description of Artificial Sequence:  Nucleic Acid Target
gagucuucacggagg

SEQ ID NO: 1220 - RNA, 15 nt, Artificial Sequence
  Description of Artificial Sequence:  Nucleic Acid Target
ggaggcuaugacuag

SEQ ID NO: 1221 - RNA, 15 nt, Artificial Sequence
  Description of Artificial Sequence:  Nucleic Acid Target
uaugacuagguacuc

SEQ ID NO: 1222 - RNA, 15 nt, Artificial Sequence
  Description of Artificial Sequence:  Nucleic Acid Target
acuagguacucugcc

SEQ ID NO: 1223 - RNA, 15 nt, Artificial Sequence
  Description of Artificial Sequence:  Nucleic Acid Target
uacgacuuggaguug

SEQ ID NO: 1224 - RNA, 15 nt, Artificial Sequence
  Description of Artificial Sequence:  Nucleic Acid Target
uuggaguugauaaca

SEQ ID NO: 1225 - RNA, 15 nt, Artificial Sequence
  Description of Artificial Sequence:  Nucleic Acid Target
aguugauaacaucau

SEQ ID NO: 1226 - RNA, 15 nt, Artificial Sequence
  Description of Artificial Sequence:  Nucleic Acid Target
auaacaucaugcucc

SEQ ID NO: 1227 - RNA, 15 nt, Artificial Sequence
  Description of Artificial Sequence:  Nucleic Acid Target
aacgugucggucgcg

SEQ ID NO: 1228 - RNA, 15 nt, Artificial Sequence
  Description of Artificial Sequence:  Nucleic Acid Target
ugucggucgcgcacg

SEQ ID NO: 1229 - RNA, 15 nt, Artificial Sequence
  Description of Artificial Sequence:  Nucleic Acid Target
agaguguacuaccuc

SEQ ID NO: 1230 - RNA, 15 nt, Artificial Sequence
  Description of Artificial Sequence:  Nucleic Acid Target
guguacuaccucacu

SEQ ID NO: 1231 - RNA, 15 nt, Artificial Sequence
  Description of Artificial Sequence:  Nucleic Acid Target
acuaccucacucgug

SEQ ID NO: 1232 - RNA, 15 nt, Artificial Sequence
  Description of Artificial Sequence:  Nucleic Acid Target
ccucacucgugaucc

SEQ ID NO: 1233 - RNA, 15 nt, Artificial Sequence
  Description of Artificial Sequence:  Nucleic Acid Target
ucgugaucccaccac

SEQ ID NO: 1234 - RNA, 15 nt, Artificial Sequence
  Description of Artificial Sequence:  Nucleic Acid Target
gacagcuagacacac

SEQ ID NO: 1235 - RNA, 15 nt, Artificial Sequence
  Description of Artificial Sequence:  Nucleic Acid Target
acacacuccagucaa

SEQ ID NO: 1236 - RNA, 15 nt, Artificial Sequence
  Description of Artificial Sequence:  Nucleic Acid Target
cuccagucaacuccu

SEQ ID NO: 1237 - RNA, 15 nt, Artificial Sequence
  Description of Artificial Sequence:  Nucleic Acid Target
gucaacuccuggcua

SEQ ID NO: 1238 - RNA, 15 nt, Artificial Sequence
  Description of Artificial Sequence:  Nucleic Acid Target
ccuggcuaggcaaca

SEQ ID NO: 1239 - RNA, 15 nt, Artificial Sequence
  Description of Artificial Sequence:  Nucleic Acid Target
gcaacaucaucaugu

SEQ ID NO: 1240 - RNA, 15 nt, Artificial Sequence
  Description of Artificial Sequence:  Nucleic Acid Target
acaucaucauguaug

SEQ ID NO: 1241 - RNA, 15 nt, Artificial Sequence
  Description of Artificial Sequence:  Nucleic Acid Target
ggaugauuuugauga

SEQ ID NO: 1242 - RNA, 15 nt, Artificial Sequence
  Description of Artificial Sequence:  Nucleic Acid Target
augauuuugaugacu

SEQ ID NO: 1243 - RNA, 15 nt, Artificial Sequence
  Description of Artificial Sequence:  Nucleic Acid Target
acucacuucuucucc

SEQ ID NO: 1244 - RNA, 15 nt, Artificial Sequence
  Description of Artificial Sequence:  Nucleic Acid Target
cucacuucuucucca

SEQ ID NO: 1245 - RNA, 15 nt, Artificial Sequence
  Description of Artificial Sequence:  Nucleic Acid Target
cacuucuucuccauc

SEQ ID NO: 1246 - RNA, 15 nt, Artificial Sequence
  Description of Artificial Sequence:  Nucleic Acid Target
acuucuucuccaucc

SEQ ID NO: 1247 - RNA, 15 nt, Artificial Sequence
  Description of Artificial Sequence:  Nucleic Acid Target
uucuucuccauccuu

SEQ ID NO: 1248 - RNA, 15 nt, Artificial Sequence
  Description of Artificial Sequence:  Nucleic Acid Target
ucuccauccuucuag

SEQ ID NO: 1249 - RNA, 15 nt, Artificial Sequence
  Description of Artificial Sequence:  Nucleic Acid Target
ccauccuucuagccc

SEQ ID NO: 1250 - RNA, 15 nt, Artificial Sequence
  Description of Artificial Sequence:  Nucleic Acid Target
cauccuucuagccca

SEQ ID NO: 1251 - RNA, 15 nt, Artificial Sequence
  Description of Artificial Sequence:  Nucleic Acid Target
uccuucuagcccagg

SEQ ID NO: 1252 - RNA, 15 nt, Artificial Sequence
  Description of Artificial Sequence:  Nucleic Acid Target
aacagcuugaaaagg

SEQ ID NO: 1253 - RNA, 15 nt, Artificial Sequence
  Description of Artificial Sequence:  Nucleic Acid Target
ggccuguuacuccau

SEQ ID NO: 1254 - RNA, 15 nt, Artificial Sequence
  Description of Artificial Sequence:  Nucleic Acid Target
gccuguuacuccauu

SEQ ID NO: 1255 - RNA, 15 nt, Artificial Sequence
  Description of Artificial Sequence:  Nucleic Acid Target
uguuacuccauugag

SEQ ID NO: 1256 - RNA, 15 nt, Artificial Sequence
  Description of Artificial Sequence:  Nucleic Acid Target
acuccauugagccac

SEQ ID NO: 1257 - RNA, 15 nt, Artificial Sequence
  Description of Artificial Sequence:  Nucleic Acid Target
agccacuugaccuac

SEQ ID NO: 1258 - RNA, 15 nt, Artificial Sequence
  Description of Artificial Sequence:  Nucleic Acid Target
uugaccuaccucaga

SEQ ID NO: 1259 - RNA, 15 nt, Artificial Sequence
  Description of Artificial Sequence:  Nucleic Acid Target
ccuaccucagaucau

SEQ ID NO: 1260 - RNA, 15 nt, Artificial Sequence
  Description of Artificial Sequence:  Nucleic Acid Target
cucagaucauucaac

SEQ ID NO: 1261 - RNA, 15 nt, Artificial Sequence
  Description of Artificial Sequence:  Nucleic Acid Target
agaucauucaacgac

SEQ ID NO: 1262 - RNA, 15 nt, Artificial Sequence
  Description of Artificial Sequence:  Nucleic Acid Target
gaucauucaacgacu

SEQ ID NO: 1263 - RNA, 15 nt, Artificial Sequence
  Description of Artificial Sequence:  Nucleic Acid Target
aacgacuccaugguc

SEQ ID NO: 1264 - RNA, 15 nt, Artificial Sequence
  Description of Artificial Sequence:  Nucleic Acid Target
ccauggucuuagcgc

SEQ ID NO: 1265 - RNA, 15 nt, Artificial Sequence
  Description of Artificial Sequence:  Nucleic Acid Target
auggucuuagcgcau

SEQ ID NO: 1266 - RNA, 15 nt, Artificial Sequence
  Description of Artificial Sequence:  Nucleic Acid Target
uggucuuagcgcauu

SEQ ID NO: 1267 - RNA, 15 nt, Artificial Sequence
  Description of Artificial Sequence:  Nucleic Acid Target
agcgcauucucacuc

SEQ ID NO: 1268 - RNA, 15 nt, Artificial Sequence
  Description of Artificial Sequence:  Nucleic Acid Target
gcgcauucucacucc

SEQ ID NO: 1269 - RNA, 15 nt, Artificial Sequence
  Description of Artificial Sequence:  Nucleic Acid Target
gcauucucacuccau

SEQ ID NO: 1270 - RNA, 15 nt, Artificial Sequence
  Description of Artificial Sequence:  Nucleic Acid Target
ucucacuccauaguu

SEQ ID NO: 1271 - RNA, 15 nt, Artificial Sequence
  Description of Artificial Sequence:  Nucleic Acid Target
acuccauaguuacuc

SEQ ID NO: 1272 - RNA, 15 nt, Artificial Sequence
  Description of Artificial Sequence:  Nucleic Acid Target
ccauaguuacucucc

SEQ ID NO: 1273 - RNA, 15 nt, Artificial Sequence
  Description of Artificial Sequence:  Nucleic Acid Target
cauaguuacucucca

SEQ ID NO: 1274 - RNA, 15 nt, Artificial Sequence
  Description of Artificial Sequence:  Nucleic Acid Target
aguuacucuccaggu

SEQ ID NO: 1275 - RNA, 15 nt, Artificial Sequence
  Description of Artificial Sequence:  Nucleic Acid Target
uuacucuccagguga

SEQ ID NO: 1276 - RNA, 15 nt, Artificial Sequence
  Description of Artificial Sequence:  Nucleic Acid Target
gugagaucaauaggg

SEQ ID NO: 1277 - RNA, 15 nt, Artificial Sequence
  Description of Artificial Sequence:  Nucleic Acid Target
gaucaauaggguggc

SEQ ID NO: 1278 - RNA, 15 nt, Artificial Sequence
  Description of Artificial Sequence:  Nucleic Acid Target
gguggcuucaugccu

SEQ ID NO: 1279 - RNA, 15 nt, Artificial Sequence
  Description of Artificial Sequence:  Nucleic Acid Target
guggcuucaugccuc

SEQ ID NO: 1280 - RNA, 15 nt, Artificial Sequence
  Description of Artificial Sequence:  Nucleic Acid Target
gagacaucgggccag

SEQ ID NO: 1281 - RNA, 15 nt, Artificial Sequence
  Description of Artificial Sequence:  Nucleic Acid Target
ggcaaguaccucuuc

SEQ ID NO: 1282 - RNA, 15 nt, Artificial Sequence
  Description of Artificial Sequence:  Nucleic Acid Target
aguaccucuucaacu

SEQ ID NO: 1283 - RNA, 15 nt, Artificial Sequence
  Description of Artificial Sequence:  Nucleic Acid Target
uaccucuucaacugg

SEQ ID NO: 1284 - RNA, 15 nt, Artificial Sequence
  Description of Artificial Sequence:  Nucleic Acid Target
accucuucaacuggg

SEQ ID NO: 1285 - RNA, 15 nt, Artificial Sequence
  Description of Artificial Sequence:  Nucleic Acid Target
gggcaguaaggacca

SEQ ID NO: 1286 - RNA, 15 nt, Artificial Sequence
  Description of Artificial Sequence:  Nucleic Acid Target
ccaagcucaaacuca

SEQ ID NO: 1287 - RNA, 15 nt, Artificial Sequence
  Description of Artificial Sequence:  Nucleic Acid Target
ucaaacucacuccaa

SEQ ID NO: 1288 - RNA, 15 nt, Artificial Sequence
  Description of Artificial Sequence:  Nucleic Acid Target
acucacuccaauccc

SEQ ID NO: 1289 - RNA, 15 nt, Artificial Sequence
  Description of Artificial Sequence:  Nucleic Acid Target
cuccaaucccggccg

SEQ ID NO: 1290 - RNA, 15 nt, Artificial Sequence
  Description of Artificial Sequence:  Nucleic Acid Target
ugcugguuacagcgg

SEQ ID NO: 1291 - RNA, 15 nt, Artificial Sequence
  Description of Artificial Sequence:  Nucleic Acid Target
gcugguuacagcggg

SEQ ID NO: 1292 - RNA, 15 nt, Artificial Sequence
  Description of Artificial Sequence:  Nucleic Acid Target
ccugucucgugcccg

SEQ ID NO: 1293 - RNA, 15 nt, Artificial Sequence
  Description of Artificial Sequence:  Nucleic Acid Target
cgcugguuuaugugg

SEQ ID NO: 1294 - RNA, 15 nt, Artificial Sequence
  Description of Artificial Sequence:  Nucleic Acid Target
gcugguuuauguggu

SEQ ID NO: 1295 - RNA, 15 nt, Artificial Sequence
  Description of Artificial Sequence:  Nucleic Acid Target
cugguuuauguggug

SEQ ID NO: 1296 - RNA, 15 nt, Artificial Sequence
  Description of Artificial Sequence:  Nucleic Acid Target
aggccauccccuuuu

SEQ ID NO: 1297 - RNA, 15 nt, Artificial Sequence
  Description of Artificial Sequence:  Nucleic Acid Target
auccccuuuuuuuuu

SEQ ID NO: 1298 - RNA, 14 nt, Artificial Sequence
  Description of Artificial Sequence:  Nucleic Acid Target
cccccgauuggggg

SEQ ID NO: 1299 - RNA, 14 nt, Artificial Sequence
  Description of Artificial Sequence:  Nucleic Acid Target
cuacugucuucacg

SEQ ID NO: 1300 - RNA, 14 nt, Artificial Sequence
  Description of Artificial Sequence:  Nucleic Acid Target
gugcagccuccagg

SEQ ID NO: 1301 - RNA, 14 nt, Artificial Sequence
  Description of Artificial Sequence:  Nucleic Acid Target
aacccgcucaaugc

SEQ ID NO: 1302 - RNA, 14 nt, Artificial Sequence
  Description of Artificial Sequence:  Nucleic Acid Target
guacugccugauag

SEQ ID NO: 1303 - RNA, 14 nt, Artificial Sequence
  Description of Artificial Sequence:  Nucleic Acid Target
cuaccgccgcccac

SEQ ID NO: 1304 - RNA, 14 nt, Artificial Sequence
  Description of Artificial Sequence:  Nucleic Acid Target
ccgccgcccacagg

SEQ ID NO: 1305 - RNA, 14 nt, Artificial Sequence
  Description of Artificial Sequence:  Nucleic Acid Target
ggucagaucguugg

SEQ ID NO: 1306 - RNA, 14 nt, Artificial Sequence
  Description of Artificial Sequence:  Nucleic Acid Target
gaacggucgcaacc

SEQ ID NO: 1307 - RNA, 14 nt, Artificial Sequence
  Description of Artificial Sequence:  Nucleic Acid Target
ucgccgacccgagg

SEQ ID NO: 1308 - RNA, 14 nt, Artificial Sequence
  Description of Artificial Sequence:  Nucleic Acid Target
gcucagccugggua

SEQ ID NO: 1309 - RNA, 14 nt, Artificial Sequence
  Description of Artificial Sequence:  Nucleic Acid Target
ccgcggcucccggc

SEQ ID NO: 1310 - RNA, 14 nt, Artificial Sequence
  Description of Artificial Sequence:  Nucleic Acid Target
ucccggccuaguug

SEQ ID NO: 1311 - RNA, 14 nt, Artificial Sequence
  Description of Artificial Sequence:  Nucleic Acid Target
ccacggacccccgg

SEQ ID NO: 1312 - RNA, 14 nt, Artificial Sequence
  Description of Artificial Sequence:  Nucleic Acid Target
gugcggcuucgccg

SEQ ID NO: 1313 - RNA, 14 nt, Artificial Sequence
  Description of Artificial Sequence:  Nucleic Acid Target
ucgccgaccucaug

SEQ ID NO: 1314 - RNA, 14 nt, Artificial Sequence
  Description of Artificial Sequence:  Nucleic Acid Target
auuccgcucgucgg

SEQ ID NO: 1315 - RNA, 14 nt, Artificial Sequence
  Description of Artificial Sequence:  Nucleic Acid Target
gcccgguugcucuu

SEQ ID NO: 1316 - RNA, 14 nt, Artificial Sequence
  Description of Artificial Sequence:  Nucleic Acid Target
gcccugcuguccug

SEQ ID NO: 1317 - RNA, 14 nt, Artificial Sequence
  Description of Artificial Sequence:  Nucleic Acid Target
cugcuguccuguuu

SEQ ID NO: 1318 - RNA, 14 nt, Artificial Sequence
  Description of Artificial Sequence:  Nucleic Acid Target
guccuguuugacca

SEQ ID NO: 1319 - RNA, 14 nt, Artificial Sequence
  Description of Artificial Sequence:  Nucleic Acid Target
ucccagcuuccgcu

SEQ ID NO: 1320 - RNA, 14 nt, Artificial Sequence
  Description of Artificial Sequence:  Nucleic Acid Target
cuuccgcuuaucag

SEQ ID NO: 1321 - RNA, 14 nt, Artificial Sequence
  Description of Artificial Sequence:  Nucleic Acid Target
ugacugcuccaacu

SEQ ID NO: 1322 - RNA, 14 nt, Artificial Sequence
  Description of Artificial Sequence:  Nucleic Acid Target
cucccguuguuggg

SEQ ID NO: 1323 - RNA, 14 nt, Artificial Sequence
  Description of Artificial Sequence:  Nucleic Acid Target
gggcggccgcuuuc

SEQ ID NO: 1324 - RNA, 14 nt, Artificial Sequence
  Description of Artificial Sequence:  Nucleic Acid Target
cggccgcuuucugu

SEQ ID NO: 1325 - RNA, 14 nt, Artificial Sequence
  Description of Artificial Sequence:  Nucleic Acid Target
uuucuguuccgcca

SEQ ID NO: 1326 - RNA, 14 nt, Artificial Sequence
  Description of Artificial Sequence:  Nucleic Acid Target
cugcggauccguuu

SEQ ID NO: 1327 - RNA, 14 nt, Artificial Sequence
  Description of Artificial Sequence:  Nucleic Acid Target
gauccguuuuccuc

SEQ ID NO: 1328 - RNA, 14 nt, Artificial Sequence
  Description of Artificial Sequence:  Nucleic Acid Target
ucccaguuguucac

SEQ ID NO: 1329 - RNA, 14 nt, Artificial Sequence
  Description of Artificial Sequence:  Nucleic Acid Target
caacagcccuagug

SEQ ID NO: 1330 - RNA, 14 nt, Artificial Sequence
  Description of Artificial Sequence:  Nucleic Acid Target
cuccggaucccaca

SEQ ID NO: 1331 - RNA, 14 nt, Artificial Sequence
  Description of Artificial Sequence:  Nucleic Acid Target
aagcugucguggau

SEQ ID NO: 1332 - RNA, 14 nt, Artificial Sequence
  Description of Artificial Sequence:  Nucleic Acid Target
ggccggcccagaga

SEQ ID NO: 1333 - RNA, 14 nt, Artificial Sequence
  Description of Artificial Sequence:  Nucleic Acid Target
auccagcucauaaa

SEQ ID NO: 1334 - RNA, 14 nt, Artificial Sequence
  Description of Artificial Sequence:  Nucleic Acid Target
uggcagcuggcaca

SEQ ID NO: 1335 - RNA, 14 nt, Artificial Sequence
  Description of Artificial Sequence:  Nucleic Acid Target
ggacugcccugaac

SEQ ID NO: 1336 - RNA, 14 nt, Artificial Sequence
  Description of Artificial Sequence:  Nucleic Acid Target
gcacuguucuacgc

SEQ ID NO: 1337 - RNA, 14 nt, Artificial Sequence
  Description of Artificial Sequence:  Nucleic Acid Target
guccggaugcccag

SEQ ID NO: 1338 - RNA, 14 nt, Artificial Sequence
  Description of Artificial Sequence:  Nucleic Acid Target
ggccagcugcagcu

SEQ ID NO: 1339 - RNA, 14 nt, Artificial Sequence
  Description of Artificial Sequence:  Nucleic Acid Target
cugcagcuccaucg

SEQ ID NO: 1340 - RNA, 14 nt, Artificial Sequence
  Description of Artificial Sequence:  Nucleic Acid Target
uuacugcuggcauu

SEQ ID NO: 1341 - RNA, 14 nt, Artificial Sequence
  Description of Artificial Sequence:  Nucleic Acid Target
guacuguuucaccc

SEQ ID NO: 1342 - RNA, 14 nt, Artificial Sequence
  Description of Artificial Sequence:  Nucleic Acid Target
gcccuguuguagug

SEQ ID NO: 1343 - RNA, 14 nt, Artificial Sequence
  Description of Artificial Sequence:  Nucleic Acid Target
cgaccgaucggucc

SEQ ID NO: 1344 - RNA, 14 nt, Artificial Sequence
  Description of Artificial Sequence:  Nucleic Acid Target
gaucgguccggugc

SEQ ID NO: 1345 - RNA, 14 nt, Artificial Sequence
  Description of Artificial Sequence:  Nucleic Acid Target
agacagaugugcug

SEQ ID NO: 1346 - RNA, 14 nt, Artificial Sequence
  Description of Artificial Sequence:  Nucleic Acid Target
gugcugcuucucaa

SEQ ID NO: 1347 - RNA, 14 nt, Artificial Sequence
  Description of Artificial Sequence:  Nucleic Acid Target
acgcggccgccaca

SEQ ID NO: 1348 - RNA, 14 nt, Artificial Sequence
  Description of Artificial Sequence:  Nucleic Acid Target
gaccugccccacgg

SEQ ID NO: 1349 - RNA, 14 nt, Artificial Sequence
  Description of Artificial Sequence:  Nucleic Acid Target
ccacggauugcuuu

SEQ ID NO: 1350 - RNA, 14 nt, Artificial Sequence
  Description of Artificial Sequence:  Nucleic Acid Target
ggacagaucggagc

SEQ ID NO: 1351 - RNA, 14 nt, Artificial Sequence
  Description of Artificial Sequence:  Nucleic Acid Target
gcucagcccgcugc

SEQ ID NO: 1352 - RNA, 14 nt, Artificial Sequence
  Description of Artificial Sequence:  Nucleic Acid Target
agcccgcugcugcu

SEQ ID NO: 1353 - RNA, 14 nt, Artificial Sequence
  Description of Artificial Sequence:  Nucleic Acid Target
ccgcugcugcuguc

SEQ ID NO: 1354 - RNA, 14 nt, Artificial Sequence
  Description of Artificial Sequence:  Nucleic Acid Target
cugcugcuguccac

SEQ ID NO: 1355 - RNA, 14 nt, Artificial Sequence
  Description of Artificial Sequence:  Nucleic Acid Target
cugcuguccacgac

SEQ ID NO: 1356 - RNA, 14 nt, Artificial Sequence
  Description of Artificial Sequence:  Nucleic Acid Target
ucccuguuccuuca

SEQ ID NO: 1357 - RNA, 14 nt, Artificial Sequence
  Description of Artificial Sequence:  Nucleic Acid Target
uaccggcucugucc

SEQ ID NO: 1358 - RNA, 14 nt, Artificial Sequence
  Description of Artificial Sequence:  Nucleic Acid Target
gcucuguccacugg

SEQ ID NO: 1359 - RNA, 14 nt, Artificial Sequence
  Description of Artificial Sequence:  Nucleic Acid Target
cagcgguugucucc

SEQ ID NO: 1360 - RNA, 14 nt, Artificial Sequence
  Description of Artificial Sequence:  Nucleic Acid Target
uggcggacgcgcgc

SEQ ID NO: 1361 - RNA, 14 nt, Artificial Sequence
  Description of Artificial Sequence:  Nucleic Acid Target
ugccugcuugugga

SEQ ID NO: 1362 - RNA, 14 nt, Artificial Sequence
  Description of Artificial Sequence:  Nucleic Acid Target
augcugcugauagc

SEQ ID NO: 1363 - RNA, 14 nt, Artificial Sequence
  Description of Artificial Sequence:  Nucleic Acid Target
aggccgcccuagag

SEQ ID NO: 1364 - RNA, 14 nt, Artificial Sequence
  Description of Artificial Sequence:  Nucleic Acid Target
gagcggauggcauu

SEQ ID NO: 1365 - RNA, 14 nt, Artificial Sequence
  Description of Artificial Sequence:  Nucleic Acid Target
gugccgccugguac

SEQ ID NO: 1366 - RNA, 14 nt, Artificial Sequence
  Description of Artificial Sequence:  Nucleic Acid Target
uggccgcugcuccu

SEQ ID NO: 1367 - RNA, 14 nt, Artificial Sequence
  Description of Artificial Sequence:  Nucleic Acid Target
ccgcugcuccugcu

SEQ ID NO: 1368 - RNA, 14 nt, Artificial Sequence
  Description of Artificial Sequence:  Nucleic Acid Target
cuccugcuccugcu

SEQ ID NO: 1369 - RNA, 14 nt, Artificial Sequence
  Description of Artificial Sequence:  Nucleic Acid Target
cuccugcuggcguu

SEQ ID NO: 1370 - RNA, 14 nt, Artificial Sequence
  Description of Artificial Sequence:  Nucleic Acid Target
gugcggcccaccca

SEQ ID NO: 1371 - RNA, 14 nt, Artificial Sequence
  Description of Artificial Sequence:  Nucleic Acid Target
cuccugcucgccau

SEQ ID NO: 1372 - RNA, 14 nt, Artificial Sequence
  Description of Artificial Sequence:  Nucleic Acid Target
ucucgguccgcuca

SEQ ID NO: 1373 - RNA, 14 nt, Artificial Sequence
  Description of Artificial Sequence:  Nucleic Acid Target
gguccgcucauggu

SEQ ID NO: 1374 - RNA, 14 nt, Artificial Sequence
  Description of Artificial Sequence:  Nucleic Acid Target
agcccgucgucuuc

SEQ ID NO: 1375 - RNA, 14 nt, Artificial Sequence
  Description of Artificial Sequence:  Nucleic Acid Target
ggacugcccgucuc

SEQ ID NO: 1376 - RNA, 14 nt, Artificial Sequence
  Description of Artificial Sequence:  Nucleic Acid Target
ugcccgucuccgcc

SEQ ID NO: 1377 - RNA, 14 nt, Artificial Sequence
  Description of Artificial Sequence:  Nucleic Acid Target
ucuccgcccgaagg

SEQ ID NO: 1378 - RNA, 14 nt, Artificial Sequence
  Description of Artificial Sequence:  Nucleic Acid Target
gaccggccgauagc

SEQ ID NO: 1379 - RNA, 14 nt, Artificial Sequence
  Description of Artificial Sequence:  Nucleic Acid Target
ucacggccuacgcc

SEQ ID NO: 1380 - RNA, 14 nt, Artificial Sequence
  Description of Artificial Sequence:  Nucleic Acid Target
ggaccgucuuccac

SEQ ID NO: 1381 - RNA, 14 nt, Artificial Sequence
  Description of Artificial Sequence:  Nucleic Acid Target
cgccggcucaaaga

SEQ ID NO: 1382 - RNA, 14 nt, Artificial Sequence
  Description of Artificial Sequence:  Nucleic Acid Target
agccggcccaaaag

SEQ ID NO: 1383 - RNA, 14 nt, Artificial Sequence
  Description of Artificial Sequence:  Nucleic Acid Target
cgucggcuggcaug

SEQ ID NO: 1384 - RNA, 14 nt, Artificial Sequence
  Description of Artificial Sequence:  Nucleic Acid Target
gcucggaccucuau

SEQ ID NO: 1385 - RNA, 14 nt, Artificial Sequence
  Description of Artificial Sequence:  Nucleic Acid Target
augcugacgucauu

SEQ ID NO: 1386 - RNA, 14 nt, Artificial Sequence
  Description of Artificial Sequence:  Nucleic Acid Target
gcgccgacgcggug

SEQ ID NO: 1387 - RNA, 14 nt, Artificial Sequence
  Description of Artificial Sequence:  Nucleic Acid Target
ugacggucggggga

SEQ ID NO: 1388 - RNA, 14 nt, Artificial Sequence
  Description of Artificial Sequence:  Nucleic Acid Target
cuacugucccccag

SEQ ID NO: 1389 - RNA, 14 nt, Artificial Sequence
  Description of Artificial Sequence:  Nucleic Acid Target
ccccagacccgucu

SEQ ID NO: 1390 - RNA, 14 nt, Artificial Sequence
  Description of Artificial Sequence:  Nucleic Acid Target
gacccgucuccuau

SEQ ID NO: 1391 - RNA, 14 nt, Artificial Sequence
  Description of Artificial Sequence:  Nucleic Acid Target
ccacugcucugccc

SEQ ID NO: 1392 - RNA, 14 nt, Artificial Sequence
  Description of Artificial Sequence:  Nucleic Acid Target
gcucugcccuucgg

SEQ ID NO: 1393 - RNA, 14 nt, Artificial Sequence
  Description of Artificial Sequence:  Nucleic Acid Target
gggcugcugugugc

SEQ ID NO: 1394 - RNA, 14 nt, Artificial Sequence
  Description of Artificial Sequence:  Nucleic Acid Target
uacccguugagucu

SEQ ID NO: 1395 - RNA, 14 nt, Artificial Sequence
  Description of Artificial Sequence:  Nucleic Acid Target
augcgguccccggu

SEQ ID NO: 1396 - RNA, 14 nt, Artificial Sequence
  Description of Artificial Sequence:  Nucleic Acid Target
ccccggucuucacg

SEQ ID NO: 1397 - RNA, 14 nt, Artificial Sequence
  Description of Artificial Sequence:  Nucleic Acid Target
ccccggccguaccg

SEQ ID NO: 1398 - RNA, 14 nt, Artificial Sequence
  Description of Artificial Sequence:  Nucleic Acid Target
ugccggcugcguac

SEQ ID NO: 1399 - RNA, 14 nt, Artificial Sequence
  Description of Artificial Sequence:  Nucleic Acid Target
acgcagcccaaggg

SEQ ID NO: 1400 - RNA, 14 nt, Artificial Sequence
  Description of Artificial Sequence:  Nucleic Acid Target
caucuguugccgcc

SEQ ID NO: 1401 - RNA, 14 nt, Artificial Sequence
  Description of Artificial Sequence:  Nucleic Acid Target
guaccgaccccaac

SEQ ID NO: 1402 - RNA, 14 nt, Artificial Sequence
  Description of Artificial Sequence:  Nucleic Acid Target
uugccgacggugga

SEQ ID NO: 1403 - RNA, 14 nt, Artificial Sequence
  Description of Artificial Sequence:  Nucleic Acid Target
caacugacucgacu

SEQ ID NO: 1404 - RNA, 14 nt, Artificial Sequence
  Description of Artificial Sequence:  Nucleic Acid Target
gcacaguccuggac

SEQ ID NO: 1405 - RNA, 14 nt, Artificial Sequence
  Description of Artificial Sequence:  Nucleic Acid Target
agacggcuggagcg

SEQ ID NO: 1406 - RNA, 14 nt, Artificial Sequence
  Description of Artificial Sequence:  Nucleic Acid Target
gcgcggcucgucgu

SEQ ID NO: 1407 - RNA, 14 nt, Artificial Sequence
  Description of Artificial Sequence:  Nucleic Acid Target
gcucuguccaacac

SEQ ID NO: 1408 - RNA, 14 nt, Artificial Sequence
  Description of Artificial Sequence:  Nucleic Acid Target
auaccgacuagcgg

SEQ ID NO: 1409 - RNA, 14 nt, Artificial Sequence
  Description of Artificial Sequence:  Nucleic Acid Target
caacagacgcucua

SEQ ID NO: 1410 - RNA, 14 nt, Artificial Sequence
  Description of Artificial Sequence:  Nucleic Acid Target
agacagucgauuuc

SEQ ID NO: 1411 - RNA, 14 nt, Artificial Sequence
  Description of Artificial Sequence:  Nucleic Acid Target
uuucagcuuggauc

SEQ ID NO: 1412 - RNA, 14 nt, Artificial Sequence
  Description of Artificial Sequence:  Nucleic Acid Target
gaacggcccucggg

SEQ ID NO: 1413 - RNA, 14 nt, Artificial Sequence
  Description of Artificial Sequence:  Nucleic Acid Target
cuucgguccugugu

SEQ ID NO: 1414 - RNA, 14 nt, Artificial Sequence
  Description of Artificial Sequence:  Nucleic Acid Target
cgcccgcugagacu

SEQ ID NO: 1415 - RNA, 14 nt, Artificial Sequence
  Description of Artificial Sequence:  Nucleic Acid Target
ugcccgucugccag

SEQ ID NO: 1416 - RNA, 14 nt, Artificial Sequence
  Description of Artificial Sequence:  Nucleic Acid Target
uuccugucccaaac

SEQ ID NO: 1417 - RNA, 14 nt, Artificial Sequence
  Description of Artificial Sequence:  Nucleic Acid Target
auacggcuuaaacc

SEQ ID NO: 1418 - RNA, 14 nt, Artificial Sequence
  Description of Artificial Sequence:  Nucleic Acid Target
ccccugcuguauag

SEQ ID NO: 1419 - RNA, 14 nt, Artificial Sequence
  Description of Artificial Sequence:  Nucleic Acid Target
gagccguucaaaau

SEQ ID NO: 1420 - RNA, 14 nt, Artificial Sequence
  Description of Artificial Sequence:  Nucleic Acid Target
ugucggccgaccug

SEQ ID NO: 1421 - RNA, 14 nt, Artificial Sequence
  Description of Artificial Sequence:  Nucleic Acid Target
cggccgaccuggag

SEQ ID NO: 1422 - RNA, 14 nt, Artificial Sequence
  Description of Artificial Sequence:  Nucleic Acid Target
uugcagcucuggcc

SEQ ID NO: 1423 - RNA, 14 nt, Artificial Sequence
  Description of Artificial Sequence:  Nucleic Acid Target
ggccggcuguuguu

SEQ ID NO: 1424 - RNA, 14 nt, Artificial Sequence
  Description of Artificial Sequence:  Nucleic Acid Target
cggcuguuguuccc

SEQ ID NO: 1425 - RNA, 14 nt, Artificial Sequence
  Description of Artificial Sequence:  Nucleic Acid Target
augcagcucgccga

SEQ ID NO: 1426 - RNA, 14 nt, Artificial Sequence
  Description of Artificial Sequence:  Nucleic Acid Target
gagcaguucaagca

SEQ ID NO: 1427 - RNA, 14 nt, Artificial Sequence
  Description of Artificial Sequence:  Nucleic Acid Target
aggccgcugcuccc

SEQ ID NO: 1428 - RNA, 14 nt, Artificial Sequence
  Description of Artificial Sequence:  Nucleic Acid Target
ccgcugcucccgug

SEQ ID NO: 1429 - RNA, 14 nt, Artificial Sequence
  Description of Artificial Sequence:  Nucleic Acid Target
acucugccugggaa

SEQ ID NO: 1430 - RNA, 14 nt, Artificial Sequence
  Description of Artificial Sequence:  Nucleic Acid Target
ucacugauggcauu

SEQ ID NO: 1431 - RNA, 14 nt, Artificial Sequence
  Description of Artificial Sequence:  Nucleic Acid Target
ucacagccucuauc

SEQ ID NO: 1432 - RNA, 14 nt, Artificial Sequence
  Description of Artificial Sequence:  Nucleic Acid Target
caccaguccgcuca

SEQ ID NO: 1433 - RNA, 14 nt, Artificial Sequence
  Description of Artificial Sequence:  Nucleic Acid Target
aguccgcucaccac

SEQ ID NO: 1434 - RNA, 14 nt, Artificial Sequence
  Description of Artificial Sequence:  Nucleic Acid Target
cuccuguucaacau

SEQ ID NO: 1435 - RNA, 14 nt, Artificial Sequence
  Description of Artificial Sequence:  Nucleic Acid Target
uggcugcucaacuc

SEQ ID NO: 1436 - RNA, 14 nt, Artificial Sequence
  Description of Artificial Sequence:  Nucleic Acid Target
gugcugcuucggcc

SEQ ID NO: 1437 - RNA, 14 nt, Artificial Sequence
  Description of Artificial Sequence:  Nucleic Acid Target
cuucggccuucgug

SEQ ID NO: 1438 - RNA, 14 nt, Artificial Sequence
  Description of Artificial Sequence:  Nucleic Acid Target
ccuccgccgaggac

SEQ ID NO: 1439 - RNA, 14 nt, Artificial Sequence
  Description of Artificial Sequence:  Nucleic Acid Target
aaccggcugauagc

SEQ ID NO: 1440 - RNA, 14 nt, Artificial Sequence
  Description of Artificial Sequence:  Nucleic Acid Target
acucagauccucuc

SEQ ID NO: 1441 - RNA, 14 nt, Artificial Sequence
  Description of Artificial Sequence:  Nucleic Acid Target
cuccagccucacca

SEQ ID NO: 1442 - RNA, 14 nt, Artificial Sequence
  Description of Artificial Sequence:  Nucleic Acid Target
acucagcugcugaa

SEQ ID NO: 1443 - RNA, 14 nt, Artificial Sequence
  Description of Artificial Sequence:  Nucleic Acid Target
cagcugcugaagag

SEQ ID NO: 1444 - RNA, 14 nt, Artificial Sequence
  Description of Artificial Sequence:  Nucleic Acid Target
ggacugcuccacgc

SEQ ID NO: 1445 - RNA, 14 nt, Artificial Sequence
  Description of Artificial Sequence:  Nucleic Acid Target
cuccggcucguggc

SEQ ID NO: 1446 - RNA, 14 nt, Artificial Sequence
  Description of Artificial Sequence:  Nucleic Acid Target
ugacugacuucaag

SEQ ID NO: 1447 - RNA, 14 nt, Artificial Sequence
  Description of Artificial Sequence:  Nucleic Acid Target
cuccaguccaagcu

SEQ ID NO: 1448 - RNA, 14 nt, Artificial Sequence
  Description of Artificial Sequence:  Nucleic Acid Target
cuccugccgaaauu

SEQ ID NO: 1449 - RNA, 14 nt, Artificial Sequence
  Description of Artificial Sequence:  Nucleic Acid Target
caccugcccaugug

SEQ ID NO: 1450 - RNA, 14 nt, Artificial Sequence
  Description of Artificial Sequence:  Nucleic Acid Target
aaacgguuccauga

SEQ ID NO: 1451 - RNA, 14 nt, Artificial Sequence
  Description of Artificial Sequence:  Nucleic Acid Target
uggcugcugaagag

SEQ ID NO: 1452 - RNA, 14 nt, Artificial Sequence
  Description of Artificial Sequence:  Nucleic Acid Target
ucccggcccccgaa

SEQ ID NO: 1453 - RNA, 14 nt, Artificial Sequence
  Description of Artificial Sequence:  Nucleic Acid Target
gugcgguugcacag

SEQ ID NO: 1454 - RNA, 14 nt, Artificial Sequence
  Description of Artificial Sequence:  Nucleic Acid Target
gugcagaccucucc

SEQ ID NO: 1455 - RNA, 14 nt, Artificial Sequence
  Description of Artificial Sequence:  Nucleic Acid Target
ucacagcucccaug

SEQ ID NO: 1456 - RNA, 14 nt, Artificial Sequence
  Description of Artificial Sequence:  Nucleic Acid Target
aaccggauguggca

SEQ ID NO: 1457 - RNA, 14 nt, Artificial Sequence
  Description of Artificial Sequence:  Nucleic Acid Target
ucaccgaccccucc

SEQ ID NO: 1458 - RNA, 14 nt, Artificial Sequence
  Description of Artificial Sequence:  Nucleic Acid Target
ggccagcucuucag

SEQ ID NO: 1459 - RNA, 14 nt, Artificial Sequence
  Description of Artificial Sequence:  Nucleic Acid Target
ccccggacgcugac

SEQ ID NO: 1460 - RNA, 14 nt, Artificial Sequence
  Description of Artificial Sequence:  Nucleic Acid Target
acgcugaccucauc

SEQ ID NO: 1461 - RNA, 14 nt, Artificial Sequence
  Description of Artificial Sequence:  Nucleic Acid Target
gacccgcuucgagc

SEQ ID NO: 1462 - RNA, 14 nt, Artificial Sequence
  Description of Artificial Sequence:  Nucleic Acid Target
uauccguugcagca

SEQ ID NO: 1463 - RNA, 14 nt, Artificial Sequence
  Description of Artificial Sequence:  Nucleic Acid Target
gcccggauuacaac

SEQ ID NO: 1464 - RNA, 14 nt, Artificial Sequence
  Description of Artificial Sequence:  Nucleic Acid Target
guccggacuacguc

SEQ ID NO: 1465 - RNA, 14 nt, Artificial Sequence
  Description of Artificial Sequence:  Nucleic Acid Target
uugccgccuaccac

SEQ ID NO: 1466 - RNA, 14 nt, Artificial Sequence
  Description of Artificial Sequence:  Nucleic Acid Target
auaccgccuccacg

SEQ ID NO: 1467 - RNA, 14 nt, Artificial Sequence
  Description of Artificial Sequence:  Nucleic Acid Target
ggacgguuguucug

SEQ ID NO: 1468 - RNA, 14 nt, Artificial Sequence
  Description of Artificial Sequence:  Nucleic Acid Target
cuucugccuuggcg

SEQ ID NO: 1469 - RNA, 14 nt, Artificial Sequence
  Description of Artificial Sequence:  Nucleic Acid Target
cggcagcuccggau

SEQ ID NO: 1470 - RNA, 14 nt, Artificial Sequence
  Description of Artificial Sequence:  Nucleic Acid Target
cuccggaucgucgg

SEQ ID NO: 1471 - RNA, 14 nt, Artificial Sequence
  Description of Artificial Sequence:  Nucleic Acid Target
cgucggccguugac

SEQ ID NO: 1472 - RNA, 14 nt, Artificial Sequence
  Description of Artificial Sequence:  Nucleic Acid Target
cggccguugacagc

SEQ ID NO: 1473 - RNA, 14 nt, Artificial Sequence
  Description of Artificial Sequence:  Nucleic Acid Target
cgaccgccccuccc

SEQ ID NO: 1474 - RNA, 14 nt, Artificial Sequence
  Description of Artificial Sequence:  Nucleic Acid Target
cucccgaucagacc

SEQ ID NO: 1475 - RNA, 14 nt, Artificial Sequence
  Description of Artificial Sequence:  Nucleic Acid Target
gaucagaccucuga

SEQ ID NO: 1476 - RNA, 14 nt, Artificial Sequence
  Description of Artificial Sequence:  Nucleic Acid Target
ccucugacgacggu

SEQ ID NO: 1477 - RNA, 14 nt, Artificial Sequence
  Description of Artificial Sequence:  Nucleic Acid Target
aaucugacguugag

SEQ ID NO: 1478 - RNA, 14 nt, Artificial Sequence
  Description of Artificial Sequence:  Nucleic Acid Target
acccugaucucagc

SEQ ID NO: 1479 - RNA, 14 nt, Artificial Sequence
  Description of Artificial Sequence:  Nucleic Acid Target
cgucugcugcucaa

SEQ ID NO: 1480 - RNA, 14 nt, Artificial Sequence
  Description of Artificial Sequence:  Nucleic Acid Target
cugcugcucaaugu

SEQ ID NO: 1481 - RNA, 14 nt, Artificial Sequence
  Description of Artificial Sequence:  Nucleic Acid Target
gcccugaucacgcc

SEQ ID NO: 1482 - RNA, 14 nt, Artificial Sequence
  Description of Artificial Sequence:  Nucleic Acid Target
aagcugcccaucaa

SEQ ID NO: 1483 - RNA, 14 nt, Artificial Sequence
  Description of Artificial Sequence:  Nucleic Acid Target
ucucugcugcguca

SEQ ID NO: 1484 - RNA, 14 nt, Artificial Sequence
  Description of Artificial Sequence:  Nucleic Acid Target
ugacagacugcaag

SEQ ID NO: 1485 - RNA, 14 nt, Artificial Sequence
  Description of Artificial Sequence:  Nucleic Acid Target
aagcugacgccccc

SEQ ID NO: 1486 - RNA, 14 nt, Artificial Sequence
  Description of Artificial Sequence:  Nucleic Acid Target
cauccgcuccgugu

SEQ ID NO: 1487 - RNA, 14 nt, Artificial Sequence
  Description of Artificial Sequence:  Nucleic Acid Target
gaccugcuggaaga

SEQ ID NO: 1488 - RNA, 14 nt, Artificial Sequence
  Description of Artificial Sequence:  Nucleic Acid Target
agccagcucgccuu

SEQ ID NO: 1489 - RNA, 14 nt, Artificial Sequence
  Description of Artificial Sequence:  Nucleic Acid Target
ucccagaccuggga

SEQ ID NO: 1490 - RNA, 14 nt, Artificial Sequence
  Description of Artificial Sequence:  Nucleic Acid Target
guacggauuccagu

SEQ ID NO: 1491 - RNA, 14 nt, Artificial Sequence
  Description of Artificial Sequence:  Nucleic Acid Target
cacccgcugcuuug

SEQ ID NO: 1492 - RNA, 14 nt, Artificial Sequence
  Description of Artificial Sequence:  Nucleic Acid Target
ccgcugcuuugacu

SEQ ID NO: 1493 - RNA, 14 nt, Artificial Sequence
  Description of Artificial Sequence:  Nucleic Acid Target
gagcggcucuacau

SEQ ID NO: 1494 - RNA, 14 nt, Artificial Sequence
  Description of Artificial Sequence:  Nucleic Acid Target
ccccugacuaauuc

SEQ ID NO: 1495 - RNA, 14 nt, Artificial Sequence
  Description of Artificial Sequence:  Nucleic Acid Target
gugcugacgacuag

SEQ ID NO: 1496 - RNA, 14 nt, Artificial Sequence
  Description of Artificial Sequence:  Nucleic Acid Target
cugcggccugucga

SEQ ID NO: 1497 - RNA, 14 nt, Artificial Sequence
  Description of Artificial Sequence:  Nucleic Acid Target
ggccugucgagcug

SEQ ID NO: 1498 - RNA, 14 nt, Artificial Sequence
  Description of Artificial Sequence:  Nucleic Acid Target
acucugcccccccc

SEQ ID NO: 1499 - RNA, 14 nt, Artificial Sequence
  Description of Artificial Sequence:  Nucleic Acid Target
gacccgccccaacc

SEQ ID NO: 1500 - RNA, 14 nt, Artificial Sequence
  Description of Artificial Sequence:  Nucleic Acid Target
ugucggucgcgcac

SEQ ID NO: 1501 - RNA, 14 nt, Artificial Sequence
  Description of Artificial Sequence:  Nucleic Acid Target
gaacagcuugaaaa

SEQ ID NO: 1502 - RNA, 14 nt, Artificial Sequence
  Description of Artificial Sequence:  Nucleic Acid Target
ugucagaucuacgg

SEQ ID NO: 1503 - RNA, 14 nt, Artificial Sequence
  Description of Artificial Sequence:  Nucleic Acid Target
ccucagaucauuca

SEQ ID NO: 1504 - RNA, 14 nt, Artificial Sequence
  Description of Artificial Sequence:  Nucleic Acid Target
guaccgcccuugcg

SEQ ID NO: 1505 - RNA, 14 nt, Artificial Sequence
  Description of Artificial Sequence:  Nucleic Acid Target
cuacugucccaagg

SEQ ID NO: 1506 - RNA, 14 nt, Artificial Sequence
  Description of Artificial Sequence:  Nucleic Acid Target
ucccggccgcgucc

SEQ ID NO: 1507 - RNA, 14 nt, Artificial Sequence
  Description of Artificial Sequence:  Nucleic Acid Target
ucccagcuggacuu

SEQ ID NO: 1508 - RNA, 14 nt, Artificial Sequence
  Description of Artificial Sequence:  Nucleic Acid Target
guccagcugguucg

SEQ ID NO: 1509 - RNA, 14 nt, Artificial Sequence
  Description of Artificial Sequence:  Nucleic Acid Target
ucacagccugucuc

SEQ ID NO: 1510 - RNA, 14 nt, Artificial Sequence
  Description of Artificial Sequence:  Nucleic Acid Target
agccugucucgugc

SEQ ID NO: 1511 - RNA, 14 nt, Artificial Sequence
  Description of Artificial Sequence:  Nucleic Acid Target
ugcccgaccccgcu

SEQ ID NO: 1512 - RNA, 14 nt, Artificial Sequence
  Description of Artificial Sequence:  Nucleic Acid Target
accccgcugguuua

SEQ ID NO: 1513 - RNA, 14 nt, Artificial Sequence
  Description of Artificial Sequence:  Nucleic Acid Target
uaccugcuccccaa

SEQ ID NO: 1514 - RNA, 15 nt, Artificial Sequence
  Description of Artificial Sequence:  Nucleic Acid Target
acggucuacgagacc

SEQ ID NO: 1515 - RNA, 15 nt, Artificial Sequence
  Description of Artificial Sequence:  Nucleic Acid Target
gagaccucccggggc

SEQ ID NO: 1516 - RNA, 15 nt, Artificial Sequence
  Description of Artificial Sequence:  Nucleic Acid Target
gggcacucgcaagca

SEQ ID NO: 1517 - RNA, 15 nt, Artificial Sequence
  Description of Artificial Sequence:  Nucleic Acid Target
gcacccuaucaggca

SEQ ID NO: 1518 - RNA, 15 nt, Artificial Sequence
  Description of Artificial Sequence:  Nucleic Acid Target
aaggccuuucgcgac

SEQ ID NO: 1519 - RNA, 15 nt, Artificial Sequence
  Description of Artificial Sequence:  Nucleic Acid Target
aaggccuuucgcaac

SEQ ID NO: 1520 - RNA, 15 nt, Artificial Sequence
  Description of Artificial Sequence:  Nucleic Acid Target
cacuacucggcuagc

SEQ ID NO: 1521 - RNA, 15 nt, Artificial Sequence
  Description of Artificial Sequence:  Nucleic Acid Target
gguugauccaagaaa

SEQ ID NO: 1522 - RNA, 15 nt, Artificial Sequence
  Description of Artificial Sequence:  Nucleic Acid Target
gguuuauccaagaaa

SEQ ID NO: 1523 - RNA, 15 nt, Artificial Sequence
  Description of Artificial Sequence:  Nucleic Acid Target
ggcaauuccggugua

SEQ ID NO: 1524 - RNA, 15 nt, Artificial Sequence
  Description of Artificial Sequence:  Nucleic Acid Target
ccgguguacucaccg

SEQ ID NO: 1525 - RNA, 15 nt, Artificial Sequence
  Description of Artificial Sequence:  Nucleic Acid Target
guguacucaccgguu

SEQ ID NO: 1526 - RNA, 15 nt, Artificial Sequence
  Description of Artificial Sequence:  Nucleic Acid Target
gaccacuauggcucu

SEQ ID NO: 1527 - RNA, 15 nt, Artificial Sequence
  Description of Artificial Sequence:  Nucleic Acid Target
cgacacucauacuaa

SEQ ID NO: 1528 - RNA, 15 nt, Artificial Sequence
  Description of Artificial Sequence:  Nucleic Acid Target
cacggucuacgagac

SEQ ID NO: 1529 - RNA, 15 nt, Artificial Sequence
  Description of Artificial Sequence:  Nucleic Acid Target
acgagaccucccggg

SEQ ID NO: 1530 - RNA, 15 nt, Artificial Sequence
  Description of Artificial Sequence:  Nucleic Acid Target
cgagaccucccgggg

SEQ ID NO: 1531 - RNA, 15 nt, Artificial Sequence
  Description of Artificial Sequence:  Nucleic Acid Target
agaccucccggggca

SEQ ID NO: 1532 - RNA, 15 nt, Artificial Sequence
  Description of Artificial Sequence:  Nucleic Acid Target
gaccucccggggcac

SEQ ID NO: 1533 - RNA, 15 nt, Artificial Sequence
  Description of Artificial Sequence:  Nucleic Acid Target
ccggggcacucgcaa

SEQ ID NO: 1534 - RNA, 15 nt, Artificial Sequence
  Description of Artificial Sequence:  Nucleic Acid Target
ggggcacucgcaagc

SEQ ID NO: 1535 - RNA, 15 nt, Artificial Sequence
  Description of Artificial Sequence:  Nucleic Acid Target
cacucgcaagcaccc

SEQ ID NO: 1536 - RNA, 15 nt, Artificial Sequence
  Description of Artificial Sequence:  Nucleic Acid Target
cgcaagcacccuauc

SEQ ID NO: 1537 - RNA, 15 nt, Artificial Sequence
  Description of Artificial Sequence:  Nucleic Acid Target
caagcacccuaucag

SEQ ID NO: 1538 - RNA, 15 nt, Artificial Sequence
  Description of Artificial Sequence:  Nucleic Acid Target
aagcacccuaucagg

SEQ ID NO: 1539 - RNA, 15 nt, Artificial Sequence
  Description of Artificial Sequence:  Nucleic Acid Target
agcacccuaucaggc

SEQ ID NO: 1540 - RNA, 15 nt, Artificial Sequence
  Description of Artificial Sequence:  Nucleic Acid Target
aucaggcaguaccac

SEQ ID NO: 1541 - RNA, 15 nt, Artificial Sequence
  Description of Artificial Sequence:  Nucleic Acid Target
gcaguaccacaaggc

SEQ ID NO: 1542 - RNA, 15 nt, Artificial Sequence
  Description of Artificial Sequence:  Nucleic Acid Target
caguaccacaaggcc

SEQ ID NO: 1543 - RNA, 15 nt, Artificial Sequence
  Description of Artificial Sequence:  Nucleic Acid Target
guaccacaaggccuu

SEQ ID NO: 1544 - RNA, 15 nt, Artificial Sequence
  Description of Artificial Sequence:  Nucleic Acid Target
caaggccuuucgcga

SEQ ID NO: 1545 - RNA, 15 nt, Artificial Sequence
  Description of Artificial Sequence:  Nucleic Acid Target
caaggccuuucgcaa

SEQ ID NO: 1546 - RNA, 15 nt, Artificial Sequence
  Description of Artificial Sequence:  Nucleic Acid Target
acccaacacuacucg

SEQ ID NO: 1547 - RNA, 15 nt, Artificial Sequence
  Description of Artificial Sequence:  Nucleic Acid Target
ccaacacuacucggc

SEQ ID NO: 1548 - RNA, 15 nt, Artificial Sequence
  Description of Artificial Sequence:  Nucleic Acid Target
acacuacucggcuag

SEQ ID NO: 1549 - RNA, 15 nt, Artificial Sequence
  Description of Artificial Sequence:  Nucleic Acid Target
acucggcuagcaguc

SEQ ID NO: 1550 - RNA, 15 nt, Artificial Sequence
  Description of Artificial Sequence:  Nucleic Acid Target
agcagucucgcgggg

SEQ ID NO: 1551 - RNA, 15 nt, Artificial Sequence
  Description of Artificial Sequence:  Nucleic Acid Target
cgggggcacgcccaa

SEQ ID NO: 1552 - RNA, 15 nt, Artificial Sequence
  Description of Artificial Sequence:  Nucleic Acid Target
guugauccaagaaag

SEQ ID NO: 1553 - RNA, 15 nt, Artificial Sequence
  Description of Artificial Sequence:  Nucleic Acid Target
guuuauccaagaaag

SEQ ID NO: 1554 - RNA, 15 nt, Artificial Sequence
  Description of Artificial Sequence:  Nucleic Acid Target
uugauccaagaaagg

SEQ ID NO: 1555 - RNA, 15 nt, Artificial Sequence
  Description of Artificial Sequence:  Nucleic Acid Target
uuuauccaagaaagg

SEQ ID NO: 1556 - RNA, 15 nt, Artificial Sequence
  Description of Artificial Sequence:  Nucleic Acid Target
gcaauuccgguguac

SEQ ID NO: 1557 - RNA, 15 nt, Artificial Sequence
  Description of Artificial Sequence:  Nucleic Acid Target
gguguacucaccggu

SEQ ID NO: 1558 - RNA, 15 nt, Artificial Sequence
  Description of Artificial Sequence:  Nucleic Acid Target
uguacucaccgguuc

SEQ ID NO: 1559 - RNA, 15 nt, Artificial Sequence
  Description of Artificial Sequence:  Nucleic Acid Target
uacucaccgguuccg

SEQ ID NO: 1560 - RNA, 15 nt, Artificial Sequence
  Description of Artificial Sequence:  Nucleic Acid Target
ccgguuccgcagacc

SEQ ID NO: 1561 - RNA, 15 nt, Artificial Sequence
  Description of Artificial Sequence:  Nucleic Acid Target
guuccgcagaccacu

SEQ ID NO: 1562 - RNA, 15 nt, Artificial Sequence
  Description of Artificial Sequence:  Nucleic Acid Target
cgcagaccacuaugg

SEQ ID NO: 1563 - RNA, 15 nt, Artificial Sequence
  Description of Artificial Sequence:  Nucleic Acid Target
gcagaccacuauggc

SEQ ID NO: 1564 - RNA, 15 nt, Artificial Sequence
  Description of Artificial Sequence:  Nucleic Acid Target
agaccacuauggcuc

SEQ ID NO: 1565 - RNA, 15 nt, Artificial Sequence
  Description of Artificial Sequence:  Nucleic Acid Target
cuauggcucucccgg

SEQ ID NO: 1566 - RNA, 15 nt, Artificial Sequence
  Description of Artificial Sequence:  Nucleic Acid Target
auggcucucccggga

SEQ ID NO: 1567 - RNA, 15 nt, Artificial Sequence
  Description of Artificial Sequence:  Nucleic Acid Target
ggcucucccgggagg

SEQ ID NO: 1568 - RNA, 15 nt, Artificial Sequence
  Description of Artificial Sequence:  Nucleic Acid Target
gcucucccgggaggg

SEQ ID NO: 1569 - RNA, 15 nt, Artificial Sequence
  Description of Artificial Sequence:  Nucleic Acid Target
gacacucauacuaac

SEQ ID NO: 1570 - RNA, 15 nt, Artificial Sequence
  Description of Artificial Sequence:  Nucleic Acid Target
cucauacuaacgcca

SEQ ID NO: 1571 - RNA, 15 nt, Artificial Sequence
  Description of Artificial Sequence:  Nucleic Acid Target
aucacuccccuguga

SEQ ID NO: 1572 - RNA, 15 nt, Artificial Sequence
  Description of Artificial Sequence:  Nucleic Acid Target
ucacuccccugugag

SEQ ID NO: 1573 - RNA, 15 nt, Artificial Sequence
  Description of Artificial Sequence:  Nucleic Acid Target
cacuccccugugagg

SEQ ID NO: 1574 - RNA, 15 nt, Artificial Sequence
  Description of Artificial Sequence:  Nucleic Acid Target
acuccccugugagga

SEQ ID NO: 1575 - RNA, 15 nt, Artificial Sequence
  Description of Artificial Sequence:  Nucleic Acid Target
gaggaacuacugucu

SEQ ID NO: 1576 - RNA, 15 nt, Artificial Sequence
  Description of Artificial Sequence:  Nucleic Acid Target
gaacuacugucuuca

SEQ ID NO: 1577 - RNA, 15 nt, Artificial Sequence
  Description of Artificial Sequence:  Nucleic Acid Target
uacugucuucacgca

SEQ ID NO: 1578 - RNA, 15 nt, Artificial Sequence
  Description of Artificial Sequence:  Nucleic Acid Target
ugucuucacgcagaa

SEQ ID NO: 1579 - RNA, 15 nt, Artificial Sequence
  Description of Artificial Sequence:  Nucleic Acid Target
uucacgcagaaagcg

SEQ ID NO: 1580 - RNA, 15 nt, Artificial Sequence
  Description of Artificial Sequence:  Nucleic Acid Target
aagcgucuagccaug

SEQ ID NO: 1581 - RNA, 15 nt, Artificial Sequence
  Description of Artificial Sequence:  Nucleic Acid Target
gucuagccauggcgu

SEQ ID NO: 1582 - RNA, 15 nt, Artificial Sequence
  Description of Artificial Sequence:  Nucleic Acid Target
ucuagccauggcguu

SEQ ID NO: 1583 - RNA, 15 nt, Artificial Sequence
  Description of Artificial Sequence:  Nucleic Acid Target
gucgugcagccucca

SEQ ID NO: 1584 - RNA, 15 nt, Artificial Sequence
  Description of Artificial Sequence:  Nucleic Acid Target
gugcagccuccagga

SEQ ID NO: 1585 - RNA, 15 nt, Artificial Sequence
  Description of Artificial Sequence:  Nucleic Acid Target
ugcagccuccaggac

SEQ ID NO: 1586 - RNA, 15 nt, Artificial Sequence
  Description of Artificial Sequence:  Nucleic Acid Target
cagccuccaggaccc

SEQ ID NO: 1587 - RNA, 15 nt, Artificial Sequence
  Description of Artificial Sequence:  Nucleic Acid Target
agccuccaggacccc

SEQ ID NO: 1588 - RNA, 15 nt, Artificial Sequence
  Description of Artificial Sequence:  Nucleic Acid Target
ccaggacccccccuc

SEQ ID NO: 1589 - RNA, 15 nt, Artificial Sequence
  Description of Artificial Sequence:  Nucleic Acid Target
caggacccccccucc

SEQ ID NO: 1590 - RNA, 15 nt, Artificial Sequence
  Description of Artificial Sequence:  Nucleic Acid Target
aggacccccccuccc

SEQ ID NO: 1591 - RNA, 15 nt, Artificial Sequence
  Description of Artificial Sequence:  Nucleic Acid Target
ggacccccccucccg

SEQ ID NO: 1592 - RNA, 15 nt, Artificial Sequence
  Description of Artificial Sequence:  Nucleic Acid Target
gacccccccucccgg

SEQ ID NO: 1593 - RNA, 15 nt, Artificial Sequence
  Description of Artificial Sequence:  Nucleic Acid Target
acccccccucccggg

SEQ ID NO: 1594 - RNA, 15 nt, Artificial Sequence
  Description of Artificial Sequence:  Nucleic Acid Target
cccccccucccggga

SEQ ID NO: 1595 - RNA, 15 nt, Artificial Sequence
  Description of Artificial Sequence:  Nucleic Acid Target
cccccucccgggaga

SEQ ID NO: 1596 - RNA, 15 nt, Artificial Sequence
  Description of Artificial Sequence:  Nucleic Acid Target
ccccucccgggagag

SEQ ID NO: 1597 - RNA, 15 nt, Artificial Sequence
  Description of Artificial Sequence:  Nucleic Acid Target
ggagagccauagugg

SEQ ID NO: 1598 - RNA, 15 nt, Artificial Sequence
  Description of Artificial Sequence:  Nucleic Acid Target
gagagccauaguggu

SEQ ID NO: 1599 - RNA, 15 nt, Artificial Sequence
  Description of Artificial Sequence:  Nucleic Acid Target
aguggucugcggaac

SEQ ID NO: 1600 - RNA, 15 nt, Artificial Sequence
  Description of Artificial Sequence:  Nucleic Acid Target
gcggaaccggugagu

SEQ ID NO: 1601 - RNA, 15 nt, Artificial Sequence
  Description of Artificial Sequence:  Nucleic Acid Target
ugaguacaccggaau

SEQ ID NO: 1602 - RNA, 15 nt, Artificial Sequence
  Description of Artificial Sequence:  Nucleic Acid Target
aguacaccggaauug

SEQ ID NO: 1603 - RNA, 15 nt, Artificial Sequence
  Description of Artificial Sequence:  Nucleic Acid Target
ccggguccuuucuug

SEQ ID NO: 1604 - RNA, 15 nt, Artificial Sequence
  Description of Artificial Sequence:  Nucleic Acid Target
cggguccuuucuugg

SEQ ID NO: 1605 - RNA, 15 nt, Artificial Sequence
  Description of Artificial Sequence:  Nucleic Acid Target
uccuuucuuggauca

SEQ ID NO: 1606 - RNA, 15 nt, Artificial Sequence
  Description of Artificial Sequence:  Nucleic Acid Target
gaaaggccuuguggu

SEQ ID NO: 1607 - RNA, 15 nt, Artificial Sequence
  Description of Artificial Sequence:  Nucleic Acid Target
gugguacugccugau

SEQ ID NO: 1608 - RNA, 15 nt, Artificial Sequence
  Description of Artificial Sequence:  Nucleic Acid Target
agggugcuugcgagu

SEQ ID NO: 1609 - RNA, 15 nt, Artificial Sequence
  Description of Artificial Sequence:  Nucleic Acid Target
ggaggucucguagac

SEQ ID NO: 1610 - RNA, 36 nt, Artificial Sequence
  Description of Artificial Sequence:  Enzymatic Nucleic Acid Molecule
gcgugaacugaugaggccguuaggccgaaacaguag

SEQ ID NO: 1611 - RNA, 36 nt, Artificial Sequence
  Description of Artificial Sequence:  Enzymatic Nucleic Acid Molecule
auggcuacugaugaggccguuaggccgaaacgcuuu

SEQ ID NO: 1612 - RNA, 36 nt, Artificial Sequence
  Description of Artificial Sequence:  Enzymatic Nucleic Acid Molecule
ccauggccugaugaggccguuaggccgaaagacgcu

SEQ ID NO: 1613 - RNA, 36 nt, Artificial Sequence
  Description of Artificial Sequence:  Enzymatic Nucleic Acid Molecule
gcugcaccugaugaggccguuaggccgaaacacuca

SEQ ID NO: 1614 - RNA, 36 nt, Artificial Sequence
  Description of Artificial Sequence:  Enzymatic Nucleic Acid Molecule
agaccaccugaugaggccguuaggccgaaauggcuc

SEQ ID NO: 1615 - RNA, 36 nt, Artificial Sequence
  Description of Artificial Sequence:  Enzymatic Nucleic Acid Molecule
uuccgcacugaugaggccguuaggccgaaaccacua

SEQ ID NO: 1616 - RNA, 36 nt, Artificial Sequence
  Description of Artificial Sequence:  Enzymatic Nucleic Acid Molecule
uccggugcugaugaggccguuaggccgaaacucacc

SEQ ID NO: 1617 - RNA, 36 nt, Artificial Sequence
  Description of Artificial Sequence:  Enzymatic Nucleic Acid Molecule
aagaaagcugaugaggccguuaggccgaaacccggu

SEQ ID NO: 1618 - RNA, 36 nt, Artificial Sequence
  Description of Artificial Sequence:  Enzymatic Nucleic Acid Molecule
uccaagacugaugaggccguuaggccgaaaggaccc

SEQ ID NO: 1619 - RNA, 36 nt, Artificial Sequence
  Description of Artificial Sequence:  Enzymatic Nucleic Acid Molecule
auccaagcugaugaggccguuaggccgaaaaggacc

SEQ ID NO: 1620 - RNA, 36 nt, Artificial Sequence
  Description of Artificial Sequence:  Enzymatic Nucleic Acid Molecule
cuuucgccugaugaggccguuaggccgaaacccaac

SEQ ID NO: 1621 - RNA, 36 nt, Artificial Sequence
  Description of Artificial Sequence:  Enzymatic Nucleic Acid Molecule
guaccaccugaugaggccguuaggccgaaaggccuu

SEQ ID NO: 1622 - RNA, 36 nt, Artificial Sequence
  Description of Artificial Sequence:  Enzymatic Nucleic Acid Molecule
cacucgccugaugaggccguuaggccgaaagcaccc

SEQ ID NO: 1623 - RNA, 36 nt, Artificial Sequence
  Description of Artificial Sequence:  Enzymatic Nucleic Acid Molecule
ucuacgacugaugaggccguuaggccgaaaccuccc

SEQ ID NO: 1624 - RNA, 36 nt, Artificial Sequence
  Description of Artificial Sequence:  Enzymatic Nucleic Acid Molecule
ggucuaccugaugaggccguuaggccgaaagaccuc

SEQ ID NO: 1625 - RNA, 36 nt, Artificial Sequence
  Description of Artificial Sequence:  Enzymatic Nucleic Acid Molecule
cacgguccugaugaggccguuaggccgaaacgagac

SEQ ID NO: 1626 - RNA, 36 nt, Artificial Sequence
  Description of Artificial Sequence:  Enzymatic Nucleic Acid Molecule
uuucuuucugaugaggccguuaggccgaaagguuua

SEQ ID NO: 1627 - RNA, 36 nt, Artificial Sequence
  Description of Artificial Sequence:  Enzymatic Nucleic Acid Molecule
uuggugucugaugaggccguuaggccgaaacguuug

SEQ ID NO: 1628 - RNA, 36 nt, Artificial Sequence
  Description of Artificial Sequence:  Enzymatic Nucleic Acid Molecule
ugugggccugaugaggccguuaggccgaaacgguug

SEQ ID NO: 1629 - RNA, 36 nt, Artificial Sequence
  Description of Artificial Sequence:  Enzymatic Nucleic Acid Molecule
agguugucugaugaggccguuaggccgaaaccgcuc

SEQ ID NO: 1630 - RNA, 36 nt, Artificial Sequence
  Description of Artificial Sequence:  Enzymatic Nucleic Acid Molecule
uaucgaucugaugaggccguuaggccgaaaccuuac

SEQ ID NO: 1631 - RNA, 36 nt, Artificial Sequence
  Description of Artificial Sequence:  Enzymatic Nucleic Acid Molecule
aaaaaaacugaugaggccguuaggccgaaaaaaaaa

SEQ ID NO: 1632 - RNA, 36 nt, Artificial Sequence
  Description of Artificial Sequence:  Enzymatic Nucleic Acid Molecule
uaagaugcugaugaggccguuaggccgaaagccacc

SEQ ID NO: 1633 - RNA, 36 nt, Artificial Sequence
  Description of Artificial Sequence:  Enzymatic Nucleic Acid Molecule
gggcuaacugaugaggccguuaggccgaaauggagc

SEQ ID NO: 1634 - RNA, 36 nt, Artificial Sequence
  Description of Artificial Sequence:  Enzymatic Nucleic Acid Molecule
uagggcucugaugaggccguuaggccgaaagaugga

SEQ ID NO: 1635 - RNA, 36 nt, Artificial Sequence
  Description of Artificial Sequence:  Enzymatic Nucleic Acid Molecule
cuagggccugaugaggccguuaggccgaaaagaugg

SEQ ID NO: 1636 - RNA, 36 nt, Artificial Sequence
  Description of Artificial Sequence:  Enzymatic Nucleic Acid Molecule
ccgugaccugaugaggccguuaggccgaaagggcua

SEQ ID NO: 1637 - RNA, 36 nt, Artificial Sequence
  Description of Artificial Sequence:  Enzymatic Nucleic Acid Molecule
uagccgucugaugaggccguuaggccgaaacuaggg

SEQ ID NO: 1638 - RNA, 36 nt, Artificial Sequence
  Description of Artificial Sequence:  Enzymatic Nucleic Acid Molecule
ucacagccugaugaggccguuaggccgaaagccgug

SEQ ID NO: 1639 - RNA, 36 nt, Artificial Sequence
  Description of Artificial Sequence:  Enzymatic Nucleic Acid Molecule
gcucacgcugaugaggccguuaggccgaaaccuuuc

SEQ ID NO: 1640 - RNA, 36 nt, Artificial Sequence
  Description of Artificial Sequence:  Enzymatic Nucleic Acid Molecule
uauggugcugaugaggccguuaggccgaaagugucg

SEQ ID NO: 1641 - RNA, 36 nt, Artificial Sequence
  Description of Artificial Sequence:  Enzymatic Nucleic Acid Molecule
gguccugcugaugaggccguuaggccgaaaggcugc

SEQ ID NO: 1642 - RNA, 36 nt, Artificial Sequence
  Description of Artificial Sequence:  Enzymatic Nucleic Acid Molecule
cucccggcugaugaggccguuaggccgaaagggggg

SEQ ID NO: 1643 - RNA, 36 nt, Artificial Sequence
  Description of Artificial Sequence:  Enzymatic Nucleic Acid Molecule
uccuggccugaugaggccguuaggccgaaauuccgg

SEQ ID NO: 1644 - RNA, 36 nt, Artificial Sequence
  Description of Artificial Sequence:  Enzymatic Nucleic Acid Molecule
uugaucccugaugaggccguuaggccgaaagaaagg

SEQ ID NO: 1645 - RNA, 36 nt, Artificial Sequence
  Description of Artificial Sequence:  Enzymatic Nucleic Acid Molecule
aggcauucugaugaggccguuaggccgaaagcgggu

SEQ ID NO: 1646 - RNA, 36 nt, Artificial Sequence
  Description of Artificial Sequence:  Enzymatic Nucleic Acid Molecule
acucggccugaugaggccguuaggccgaaagcaguc

SEQ ID NO: 1647 - RNA, 36 nt, Artificial Sequence
  Description of Artificial Sequence:  Enzymatic Nucleic Acid Molecule
ccaacaccugaugaggccguuaggccgaaacucggc

SEQ ID NO: 1648 - RNA, 36 nt, Artificial Sequence
  Description of Artificial Sequence:  Enzymatic Nucleic Acid Molecule
gcgaccccugaugaggccguuaggccgaaacacuac

SEQ ID NO: 1649 - RNA, 36 nt, Artificial Sequence
  Description of Artificial Sequence:  Enzymatic Nucleic Acid Molecule
caggcagcugaugaggccguuaggccgaaaccacaa

SEQ ID NO: 1650 - RNA, 36 nt, Artificial Sequence
  Description of Artificial Sequence:  Enzymatic Nucleic Acid Molecule
agcaccccugaugaggccguuaggccgaaaucaggc

SEQ ID NO: 1651 - RNA, 36 nt, Artificial Sequence
  Description of Artificial Sequence:  Enzymatic Nucleic Acid Molecule
ggaacuucugaugaggccguuaggccgaaacguccu

SEQ ID NO: 1652 - RNA, 36 nt, Artificial Sequence
  Description of Artificial Sequence:  Enzymatic Nucleic Acid Molecule
gcccgggcugaugaggccguuaggccgaaacuugac

SEQ ID NO: 1653 - RNA, 36 nt, Artificial Sequence
  Description of Artificial Sequence:  Enzymatic Nucleic Acid Molecule
cgcccggcugaugaggccguuaggccgaaaacuuga

SEQ ID NO: 1654 - RNA, 36 nt, Artificial Sequence
  Description of Artificial Sequence:  Enzymatic Nucleic Acid Molecule
acgaucucugaugaggccguuaggccgaaaccaccg

SEQ ID NO: 1655 - RNA, 36 nt, Artificial Sequence
  Description of Artificial Sequence:  Enzymatic Nucleic Acid Molecule
cacaccccugaugaggccguuaggccgaaacguggg

SEQ ID NO: 1656 - RNA, 36 nt, Artificial Sequence
  Description of Artificial Sequence:  Enzymatic Nucleic Acid Molecule
gucuucccugaugaggccguuaggccgaaagucgcg

SEQ ID NO: 1657 - RNA, 36 nt, Artificial Sequence
  Description of Artificial Sequence:  Enzymatic Nucleic Acid Molecule
cguucggcugaugaggccguuaggccgaaagucuuc

SEQ ID NO: 1658 - RNA, 36 nt, Artificial Sequence
  Description of Artificial Sequence:  Enzymatic Nucleic Acid Molecule
ccguucgcugaugaggccguuaggccgaaaagucuu

SEQ ID NO: 1659 - RNA, 36 nt, Artificial Sequence
  Description of Artificial Sequence:  Enzymatic Nucleic Acid Molecule
agguugccugaugaggccguuaggccgaaaccguuc

SEQ ID NO: 1660 - RNA, 36 nt, Artificial Sequence
  Description of Artificial Sequence:  Enzymatic Nucleic Acid Molecule
uuggggacugaugaggccguuaggccgaaagguugu

SEQ ID NO: 1661 - RNA, 36 nt, Artificial Sequence
  Description of Artificial Sequence:  Enzymatic Nucleic Acid Molecule
ccuugggcugaugaggccguuaggccgaaauagguu

SEQ ID NO: 1662 - RNA, 36 nt, Artificial Sequence
  Description of Artificial Sequence:  Enzymatic Nucleic Acid Molecule
ggucggccugaugaggccguuaggccgaaagccuug

SEQ ID NO: 1663 - RNA, 36 nt, Artificial Sequence
  Description of Artificial Sequence:  Enzymatic Nucleic Acid Molecule
caggccccugaugaggccguuaggccgaaacccucg

SEQ ID NO: 1664 - RNA, 36 nt, Artificial Sequence
  Description of Artificial Sequence:  Enzymatic Nucleic Acid Molecule
ccaggcucugaugaggccguuaggccgaaagcccag

SEQ ID NO: 1665 - RNA, 36 nt, Artificial Sequence
  Description of Artificial Sequence:  Enzymatic Nucleic Acid Molecule
ccaagggcugaugaggccguuaggccgaaacccagg

SEQ ID NO: 1666 - RNA, 36 nt, Artificial Sequence
  Description of Artificial Sequence:  Enzymatic Nucleic Acid Molecule
aggggcccugaugaggccguuaggccgaaaggguac

SEQ ID NO: 1667 - RNA, 36 nt, Artificial Sequence
  Description of Artificial Sequence:  Enzymatic Nucleic Acid Molecule
ugccauacugaugaggccguuaggccgaaaggggcc

SEQ ID NO: 1668 - RNA, 36 nt, Artificial Sequence
  Description of Artificial Sequence:  Enzymatic Nucleic Acid Molecule
auugccacugaugaggccguuaggccgaaagagggg

SEQ ID NO: 1669 - RNA, 36 nt, Artificial Sequence
  Description of Artificial Sequence:  Enzymatic Nucleic Acid Molecule
gugacagcugaugaggccguuaggccgaaagccauc

SEQ ID NO: 1670 - RNA, 36 nt, Artificial Sequence
  Description of Artificial Sequence:  Enzymatic Nucleic Acid Molecule
gcggggucugaugaggccguuaggccgaaacaggag

SEQ ID NO: 1671 - RNA, 36 nt, Artificial Sequence
  Description of Artificial Sequence:  Enzymatic Nucleic Acid Molecule
aggccggcugaugaggccguuaggccgaaagccgcg

SEQ ID NO: 1672 - RNA, 36 nt, Artificial Sequence
  Description of Artificial Sequence:  Enzymatic Nucleic Acid Molecule
ccccaaccugaugaggccguuaggccgaaaggccgg

SEQ ID NO: 1673 - RNA, 36 nt, Artificial Sequence
  Description of Artificial Sequence:  Enzymatic Nucleic Acid Molecule
gggcccccugaugaggccguuaggccgaaacuaggc

SEQ ID NO: 1674 - RNA, 36 nt, Artificial Sequence
  Description of Artificial Sequence:  Enzymatic Nucleic Acid Molecule
uuacccacugaugaggccguuaggccgaaauugcgc

SEQ ID NO: 1675 - RNA, 36 nt, Artificial Sequence
  Description of Artificial Sequence:  Enzymatic Nucleic Acid Molecule
ggguauccugaugaggccguuaggccgaaaugaccu

SEQ ID NO: 1676 - RNA, 36 nt, Artificial Sequence
  Description of Artificial Sequence:  Enzymatic Nucleic Acid Molecule
gugagggcugaugaggccguuaggccgaaaucgaug

SEQ ID NO: 1677 - RNA, 36 nt, Artificial Sequence
  Description of Artificial Sequence:  Enzymatic Nucleic Acid Molecule
gucggcgcugaugaggccguuaggccgaaagccgca

SEQ ID NO: 1678 - RNA, 36 nt, Artificial Sequence
  Description of Artificial Sequence:  Enzymatic Nucleic Acid Molecule
ggucggccugaugaggccguuaggccgaaaagccgc

SEQ ID NO: 1679 - RNA, 36 nt, Artificial Sequence
  Description of Artificial Sequence:  Enzymatic Nucleic Acid Molecule
cggaaugcugaugaggccguuaggccgaaaccccau

SEQ ID NO: 1680 - RNA, 36 nt, Artificial Sequence
  Description of Artificial Sequence:  Enzymatic Nucleic Acid Molecule
cgagcggcugaugaggccguuaggccgaaauguacc

SEQ ID NO: 1681 - RNA, 36 nt, Artificial Sequence
  Description of Artificial Sequence:  Enzymatic Nucleic Acid Molecule
acgagcgcugaugaggccguuaggccgaaaauguac

SEQ ID NO: 1682 - RNA, 36 nt, Artificial Sequence
  Description of Artificial Sequence:  Enzymatic Nucleic Acid Molecule
cgccgaccugaugaggccguuaggccgaaagcggaa

SEQ ID NO: 1683 - RNA, 36 nt, Artificial Sequence
  Description of Artificial Sequence:  Enzymatic Nucleic Acid Molecule
gggcgcccugaugaggccguuaggccgaaacgagcg

SEQ ID NO: 1684 - RNA, 36 nt, Artificial Sequence
  Description of Artificial Sequence:  Enzymatic Nucleic Acid Molecule
cgccccccugaugaggccguuaggccgaaagggggg

SEQ ID NO: 1685 - RNA, 36 nt, Artificial Sequence
  Description of Artificial Sequence:  Enzymatic Nucleic Acid Molecule
gaacccgcugaugaggccguuaggccgaaacaccau

SEQ ID NO: 1686 - RNA, 36 nt, Artificial Sequence
  Description of Artificial Sequence:  Enzymatic Nucleic Acid Molecule
ccuccagcugaugaggccguuaggccgaaacccgga

SEQ ID NO: 1687 - RNA, 36 nt, Artificial Sequence
  Description of Artificial Sequence:  Enzymatic Nucleic Acid Molecule
uccuccacugaugaggccguuaggccgaaaacccgg

SEQ ID NO: 1688 - RNA, 36 nt, Artificial Sequence
  Description of Artificial Sequence:  Enzymatic Nucleic Acid Molecule
uguugcgcugaugaggccguuaggccgaaaguucac

SEQ ID NO: 1689 - RNA, 36 nt, Artificial Sequence
  Description of Artificial Sequence:  Enzymatic Nucleic Acid Molecule
accgggccugaugaggccguuaggccgaaaguuccc

SEQ ID NO: 1690 - RNA, 36 nt, Artificial Sequence
  Description of Artificial Sequence:  Enzymatic Nucleic Acid Molecule
aaagagccugaugaggccguuaggccgaaaccgggc

SEQ ID NO: 1691 - RNA, 36 nt, Artificial Sequence
  Description of Artificial Sequence:  Enzymatic Nucleic Acid Molecule
agagaaacugaugaggccguuaggccgaaagcaacc

SEQ ID NO: 1692 - RNA, 36 nt, Artificial Sequence
  Description of Artificial Sequence:  Enzymatic Nucleic Acid Molecule
ugccucacugaugaggccguuaggccgaaacacaau

SEQ ID NO: 1693 - RNA, 36 nt, Artificial Sequence
  Description of Artificial Sequence:  Enzymatic Nucleic Acid Molecule
uaugcaucugaugaggccguuaggccgaaaucaugc

SEQ ID NO: 1694 - RNA, 36 nt, Artificial Sequence
  Description of Artificial Sequence:  Enzymatic Nucleic Acid Molecule
cgcagggcugaugaggccguuaggccgaaacgcacc

SEQ ID NO: 1695 - RNA, 36 nt, Artificial Sequence
  Description of Artificial Sequence:  Enzymatic Nucleic Acid Molecule
ucucccgcugaugaggccguuaggccgaaacgcagg

SEQ ID NO: 1696 - RNA, 36 nt, Artificial Sequence
  Description of Artificial Sequence:  Enzymatic Nucleic Acid Molecule
uucuccccugaugaggccguuaggccgaaaacgcag

SEQ ID NO: 1697 - RNA, 36 nt, Artificial Sequence
  Description of Artificial Sequence:  Enzymatic Nucleic Acid Molecule
acaacggcugaugaggccguuaggccgaaaggcguu

SEQ ID NO: 1698 - RNA, 36 nt, Artificial Sequence
  Description of Artificial Sequence:  Enzymatic Nucleic Acid Molecule
acccaaccugaugaggccguuaggccgaaacgggag

SEQ ID NO: 1699 - RNA, 36 nt, Artificial Sequence
  Description of Artificial Sequence:  Enzymatic Nucleic Acid Molecule
gcuaccccugaugaggccguuaggccgaaacaacgg

SEQ ID NO: 1700 - RNA, 36 nt, Artificial Sequence
  Description of Artificial Sequence:  Enzymatic Nucleic Acid Molecule
ugagcgccugaugaggccguuaggccgaaacccaac

SEQ ID NO: 1701 - RNA, 36 nt, Artificial Sequence
  Description of Artificial Sequence:  Enzymatic Nucleic Acid Molecule
gcaaguccugaugaggccguuaggccgaaacguggc

SEQ ID NO: 1702 - RNA, 36 nt, Artificial Sequence
  Description of Artificial Sequence:  Enzymatic Nucleic Acid Molecule
aacgagccugaugaggccguuaggccgaaagucgac

SEQ ID NO: 1703 - RNA, 36 nt, Artificial Sequence
  Description of Artificial Sequence:  Enzymatic Nucleic Acid Molecule
ccccaaccugaugaggccguuaggccgaaagcaagu

SEQ ID NO: 1704 - RNA, 36 nt, Artificial Sequence
  Description of Artificial Sequence:  Enzymatic Nucleic Acid Molecule
ccgcccccugaugaggccguuaggccgaaacgagca

SEQ ID NO: 1705 - RNA, 36 nt, Artificial Sequence
  Description of Artificial Sequence:  Enzymatic Nucleic Acid Molecule
ggaacagcugaugaggccguuaggccgaaaagcggc

SEQ ID NO: 1706 - RNA, 36 nt, Artificial Sequence
  Description of Artificial Sequence:  Enzymatic Nucleic Acid Molecule
cggaacacugaugaggccguuaggccgaaaaagcgg

SEQ ID NO: 1707 - RNA, 36 nt, Artificial Sequence
  Description of Artificial Sequence:  Enzymatic Nucleic Acid Molecule
auggcggcugaugaggccguuaggccgaaacagaaa

SEQ ID NO: 1708 - RNA, 36 nt, Artificial Sequence
  Description of Artificial Sequence:  Enzymatic Nucleic Acid Molecule
cauggcgcugaugaggccguuaggccgaaaacagaa

SEQ ID NO: 1709 - RNA, 36 nt, Artificial Sequence
  Description of Artificial Sequence:  Enzymatic Nucleic Acid Molecule
ccccacgcugaugaggccguuaggccgaaacauggc

SEQ ID NO: 1710 - RNA, 36 nt, Artificial Sequence
  Description of Artificial Sequence:  Enzymatic Nucleic Acid Molecule
gaaaacgcugaugaggccguuaggccgaaauccgca

SEQ ID NO: 1711 - RNA, 36 nt, Artificial Sequence
  Description of Artificial Sequence:  Enzymatic Nucleic Acid Molecule
cgaggaacugaugaggccguuaggccgaaacggauc

SEQ ID NO: 1712 - RNA, 36 nt, Artificial Sequence
  Description of Artificial Sequence:  Enzymatic Nucleic Acid Molecule
acgaggacugaugaggccguuaggccgaaaacggau

SEQ ID NO: 1713 - RNA, 36 nt, Artificial Sequence
  Description of Artificial Sequence:  Enzymatic Nucleic Acid Molecule
gacgaggcugaugaggccguuaggccgaaaaacgga

SEQ ID NO: 1714 - RNA, 36 nt, Artificial Sequence
  Description of Artificial Sequence:  Enzymatic Nucleic Acid Molecule
agacgagcugaugaggccguuaggccgaaaaaacgg

SEQ ID NO: 1715 - RNA, 36 nt, Artificial Sequence
  Description of Artificial Sequence:  Enzymatic Nucleic Acid Molecule
gaccugacugaugaggccguuaggccgaaacauggc

SEQ ID NO: 1716 - RNA, 36 nt, Artificial Sequence
  Description of Artificial Sequence:  Enzymatic Nucleic Acid Molecule
gugaccucugaugaggccguuaggccgaaauacaug

SEQ ID NO: 1717 - RNA, 36 nt, Artificial Sequence
  Description of Artificial Sequence:  Enzymatic Nucleic Acid Molecule
augcggucugaugaggccguuaggccgaaaccugau

SEQ ID NO: 1718 - RNA, 36 nt, Artificial Sequence
  Description of Artificial Sequence:  Enzymatic Nucleic Acid Molecule
uauccaccugaugaggccguuaggccgaaacagcuu

SEQ ID NO: 1719 - RNA, 36 nt, Artificial Sequence
  Description of Artificial Sequence:  Enzymatic Nucleic Acid Molecule
gccaccacugaugaggccguuaggccgaaauccacg

SEQ ID NO: 1720 - RNA, 36 nt, Artificial Sequence
  Description of Artificial Sequence:  Enzymatic Nucleic Acid Molecule
ccgcuagcugaugaggccguuaggccgaaacucccc

SEQ ID NO: 1721 - RNA, 36 nt, Artificial Sequence
  Description of Artificial Sequence:  Enzymatic Nucleic Acid Molecule
ggcccgccugaugaggccguuaggccgaaaggacuc

SEQ ID NO: 1722 - RNA, 36 nt, Artificial Sequence
  Description of Artificial Sequence:  Enzymatic Nucleic Acid Molecule
aguaggccugaugaggccguuaggccgaaaggcccg

SEQ ID NO: 1723 - RNA, 36 nt, Artificial Sequence
  Description of Artificial Sequence:  Enzymatic Nucleic Acid Molecule
ggaauagcugaugaggccguuaggccgaaaggcaag

SEQ ID NO: 1724 - RNA, 36 nt, Artificial Sequence
  Description of Artificial Sequence:  Enzymatic Nucleic Acid Molecule
cauggaacugaugaggccguuaggccgaaaguaggc

SEQ ID NO: 1725 - RNA, 36 nt, Artificial Sequence
  Description of Artificial Sequence:  Enzymatic Nucleic Acid Molecule
accauggcugaugaggccguuaggccgaaauaguag

SEQ ID NO: 1726 - RNA, 36 nt, Artificial Sequence
  Description of Artificial Sequence:  Enzymatic Nucleic Acid Molecule
caccaugcugaugaggccguuaggccgaaaauagua

SEQ ID NO: 1727 - RNA, 36 nt, Artificial Sequence
  Description of Artificial Sequence:  Enzymatic Nucleic Acid Molecule
acuuguccugaugaggccguuaggccgaaauggagc

SEQ ID NO: 1728 - RNA, 36 nt, Artificial Sequence
  Description of Artificial Sequence:  Enzymatic Nucleic Acid Molecule
cugagcgcugaugaggccguuaggccgaaacuuguc

SEQ ID NO: 1729 - RNA, 36 nt, Artificial Sequence
  Description of Artificial Sequence:  Enzymatic Nucleic Acid Molecule
ccugagccugaugaggccguuaggccgaaaacuugu

SEQ ID NO: 1730 - RNA, 36 nt, Artificial Sequence
  Description of Artificial Sequence:  Enzymatic Nucleic Acid Molecule
caucccucugaugaggccguuaggccgaaagcgaac

SEQ ID NO: 1731 - RNA, 36 nt, Artificial Sequence
  Description of Artificial Sequence:  Enzymatic Nucleic Acid Molecule
uauaggucugaugaggccguuaggccgaaauggggc

SEQ ID NO: 1732 - RNA, 36 nt, Artificial Sequence
  Description of Artificial Sequence:  Enzymatic Nucleic Acid Molecule
cucgguacugaugaggccguuaggccgaaaggugau

SEQ ID NO: 1733 - RNA, 36 nt, Artificial Sequence
  Description of Artificial Sequence:  Enzymatic Nucleic Acid Molecule
ccagcagcugaugaggccguuaggccgaaaaggccu

SEQ ID NO: 1734 - RNA, 36 nt, Artificial Sequence
  Description of Artificial Sequence:  Enzymatic Nucleic Acid Molecule
ggugcgucugaugaggccguuaggccgaaaugccag

SEQ ID NO: 1735 - RNA, 36 nt, Artificial Sequence
  Description of Artificial Sequence:  Enzymatic Nucleic Acid Molecule
aggugcgcugaugaggccguuaggccgaaaaugcca

SEQ ID NO: 1736 - RNA, 36 nt, Artificial Sequence
  Description of Artificial Sequence:  Enzymatic Nucleic Acid Molecule
cacugcccugaugaggccguuaggccgaaaggugcg

SEQ ID NO: 1737 - RNA, 36 nt, Artificial Sequence
  Description of Artificial Sequence:  Enzymatic Nucleic Acid Molecule
gguacgacugaugaggccguuaggccgaaaccacac

SEQ ID NO: 1738 - RNA, 36 nt, Artificial Sequence
  Description of Artificial Sequence:  Enzymatic Nucleic Acid Molecule
cagguaccugaugaggccguuaggccgaaauaccac

SEQ ID NO: 1739 - RNA, 36 nt, Artificial Sequence
  Description of Artificial Sequence:  Enzymatic Nucleic Acid Molecule
acgcaggcugaugaggccguuaggccgaaacgauac

SEQ ID NO: 1740 - RNA, 36 nt, Artificial Sequence
  Description of Artificial Sequence:  Enzymatic Nucleic Acid Molecule
caccugccugaugaggccguuaggccgaaacgcagg

SEQ ID NO: 1741 - RNA, 36 nt, Artificial Sequence
  Description of Artificial Sequence:  Enzymatic Nucleic Acid Molecule
uacacugcugaugaggccguuaggccgaaaccacac

SEQ ID NO: 1742 - RNA, 36 nt, Artificial Sequence
  Description of Artificial Sequence:  Enzymatic Nucleic Acid Molecule
ccacuaccugaugaggccguuaggccgaaacagggc

SEQ ID NO: 1743 - RNA, 36 nt, Artificial Sequence
  Description of Artificial Sequence:  Enzymatic Nucleic Acid Molecule
uccccaccugaugaggccguuaggccgaaacaacag

SEQ ID NO: 1744 - RNA, 36 nt, Artificial Sequence
  Description of Artificial Sequence:  Enzymatic Nucleic Acid Molecule
ccggacccugaugaggccguuaggccgaaaucgguc

SEQ ID NO: 1745 - RNA, 36 nt, Artificial Sequence
  Description of Artificial Sequence:  Enzymatic Nucleic Acid Molecule
ggcaccgcugaugaggccguuaggccgaaaccgauc

SEQ ID NO: 1746 - RNA, 36 nt, Artificial Sequence
  Description of Artificial Sequence:  Enzymatic Nucleic Acid Molecule
uuauacgcugaugaggccguuaggccgaaaggggca

SEQ ID NO: 1747 - RNA, 36 nt, Artificial Sequence
  Description of Artificial Sequence:  Enzymatic Nucleic Acid Molecule
ccaguuacugaugaggccguuaggccgaaacguagg

SEQ ID NO: 1748 - RNA, 36 nt, Artificial Sequence
  Description of Artificial Sequence:  Enzymatic Nucleic Acid Molecule
ccccagucugaugaggccguuaggccgaaauacgua

SEQ ID NO: 1749 - RNA, 36 nt, Artificial Sequence
  Description of Artificial Sequence:  Enzymatic Nucleic Acid Molecule
acagccacugaugaggccguuaggccgaaaccaguu

SEQ ID NO: 1750 - RNA, 36 nt, Artificial Sequence
  Description of Artificial Sequence:  Enzymatic Nucleic Acid Molecule
uacagcccugaugaggccguuaggccgaaaaccagu

SEQ ID NO: 1751 - RNA, 36 nt, Artificial Sequence
  Description of Artificial Sequence:  Enzymatic Nucleic Acid Molecule
auccaugcugaugaggccguuaggccgaaacagcca

SEQ ID NO: 1752 - RNA, 36 nt, Artificial Sequence
  Description of Artificial Sequence:  Enzymatic Nucleic Acid Molecule
uugcacgcugaugaggccguuaggccgaaagggccc

SEQ ID NO: 1753 - RNA, 36 nt, Artificial Sequence
  Description of Artificial Sequence:  Enzymatic Nucleic Acid Molecule
ccccccccugaugaggccguuaggccgaaauguugc

SEQ ID NO: 1754 - RNA, 36 nt, Artificial Sequence
  Description of Artificial Sequence:  Enzymatic Nucleic Acid Molecule
gguugcccugaugaggccguuaggccgaaacccccc

SEQ ID NO: 1755 - RNA, 36 nt, Artificial Sequence
  Description of Artificial Sequence:  Enzymatic Nucleic Acid Molecule
ucaaggucugaugaggccguuaggccgaaagguugc

SEQ ID NO: 1756 - RNA, 36 nt, Artificial Sequence
  Description of Artificial Sequence:  Enzymatic Nucleic Acid Molecule
gcagguccugaugaggccguuaggccgaaaggugag

SEQ ID NO: 1757 - RNA, 36 nt, Artificial Sequence
  Description of Artificial Sequence:  Enzymatic Nucleic Acid Molecule
uuugugucugaugaggccguuaggccgaaaguggcc

SEQ ID NO: 1758 - RNA, 36 nt, Artificial Sequence
  Description of Artificial Sequence:  Enzymatic Nucleic Acid Molecule
uuuugugcugaugaggccguuaggccgaaaaguggc

SEQ ID NO: 1759 - RNA, 36 nt, Artificial Sequence
  Description of Artificial Sequence:  Enzymatic Nucleic Acid Molecule
uggcccccugaugaggccguuaggccgaaagccaca

SEQ ID NO: 1760 - RNA, 36 nt, Artificial Sequence
  Description of Artificial Sequence:  Enzymatic Nucleic Acid Molecule
agguguucugaugaggccguuaggccgaaaccaugg

SEQ ID NO: 1761 - RNA, 36 nt, Artificial Sequence
  Description of Artificial Sequence:  Enzymatic Nucleic Acid Molecule
uaggugucugaugaggccguuaggccgaaaaccaug

SEQ ID NO: 1762 - RNA, 36 nt, Artificial Sequence
  Description of Artificial Sequence:  Enzymatic Nucleic Acid Molecule
ccuuaaacugaugaggccguuaggccgaaaugguaa

SEQ ID NO: 1763 - RNA, 36 nt, Artificial Sequence
  Description of Artificial Sequence:  Enzymatic Nucleic Acid Molecule
aaccuuacugaugaggccguuaggccgaaagauggu

SEQ ID NO: 1764 - RNA, 36 nt, Artificial Sequence
  Description of Artificial Sequence:  Enzymatic Nucleic Acid Molecule
cagcacucugaugaggccguuaggccgaaagccugu

SEQ ID NO: 1765 - RNA, 36 nt, Artificial Sequence
  Description of Artificial Sequence:  Enzymatic Nucleic Acid Molecule
gcagcaccugaugaggccguuaggccgaaaagccug

SEQ ID NO: 1766 - RNA, 36 nt, Artificial Sequence
  Description of Artificial Sequence:  Enzymatic Nucleic Acid Molecule
aggucgccugaugaggccguuaggccgaaacgcucu

SEQ ID NO: 1767 - RNA, 36 nt, Artificial Sequence
  Description of Artificial Sequence:  Enzymatic Nucleic Acid Molecule
gagcucccugaugaggccguuaggccgaaaucuguc

SEQ ID NO: 1768 - RNA, 36 nt, Artificial Sequence
  Description of Artificial Sequence:  Enzymatic Nucleic Acid Molecule
gcgggcucugaugaggccguuaggccgaaagcuccg

SEQ ID NO: 1769 - RNA, 36 nt, Artificial Sequence
  Description of Artificial Sequence:  Enzymatic Nucleic Acid Molecule
ugucgugcugaugaggccguuaggccgaaacagcag

SEQ ID NO: 1770 - RNA, 36 nt, Artificial Sequence
  Description of Artificial Sequence:  Enzymatic Nucleic Acid Molecule
ucugaugcugaugaggccguuaggccgaaaggugga

SEQ ID NO: 1771 - RNA, 36 nt, Artificial Sequence
  Description of Artificial Sequence:  Enzymatic Nucleic Acid Molecule
auguucucugaugaggccguuaggccgaaauggagg

SEQ ID NO: 1772 - RNA, 36 nt, Artificial Sequence
  Description of Artificial Sequence:  Enzymatic Nucleic Acid Molecule
cguccaccugaugaggccguuaggccgaaauguucu

SEQ ID NO: 1773 - RNA, 36 nt, Artificial Sequence
  Description of Artificial Sequence:  Enzymatic Nucleic Acid Molecule
aggcacacugaugaggccguuaggccgaaacgcgcg

SEQ ID NO: 1774 - RNA, 36 nt, Artificial Sequence
  Description of Artificial Sequence:  Enzymatic Nucleic Acid Molecule
gguucuccugaugaggccguuaggccgaaagggcgg

SEQ ID NO: 1775 - RNA, 36 nt, Artificial Sequence
  Description of Artificial Sequence:  Enzymatic Nucleic Acid Molecule
cguugagcugaugaggccguuaggccgaaaccacca

SEQ ID NO: 1776 - RNA, 36 nt, Artificial Sequence
  Description of Artificial Sequence:  Enzymatic Nucleic Acid Molecule
ccgcguucugaugaggccguuaggccgaaaggacca

SEQ ID NO: 1777 - RNA, 36 nt, Artificial Sequence
  Description of Artificial Sequence:  Enzymatic Nucleic Acid Molecule
cuugaugcugaugaggccguuaggccgaaaccaggc

SEQ ID NO: 1778 - RNA, 36 nt, Artificial Sequence
  Description of Artificial Sequence:  Enzymatic Nucleic Acid Molecule
ugcccuucugaugaggccguuaggccgaaauguacc

SEQ ID NO: 1779 - RNA, 36 nt, Artificial Sequence
  Description of Artificial Sequence:  Enzymatic Nucleic Acid Molecule
ccccaggcugaugaggccguuaggccgaaaccagcc

SEQ ID NO: 1780 - RNA, 36 nt, Artificial Sequence
  Description of Artificial Sequence:  Enzymatic Nucleic Acid Molecule
cagagcacugaugaggccguuaggccgaaaugccgc

SEQ ID NO: 1781 - RNA, 36 nt, Artificial Sequence
  Description of Artificial Sequence:  Enzymatic Nucleic Acid Molecule
ccguacacugaugaggccguuaggccgaaagcauau

SEQ ID NO: 1782 - RNA, 36 nt, Artificial Sequence
  Description of Artificial Sequence:  Enzymatic Nucleic Acid Molecule
cacgccgcugaugaggccguuaggccgaaacagagc

SEQ ID NO: 1783 - RNA, 36 nt, Artificial Sequence
  Description of Artificial Sequence:  Enzymatic Nucleic Acid Molecule
ccagcagcugaugaggccguuaggccgaaagcagga

SEQ ID NO: 1784 - RNA, 36 nt, Artificial Sequence
  Description of Artificial Sequence:  Enzymatic Nucleic Acid Molecule
auggcgucugaugaggccguuaggccgaaagcccgu

SEQ ID NO: 1785 - RNA, 36 nt, Artificial Sequence
  Description of Artificial Sequence:  Enzymatic Nucleic Acid Molecule
cauggcgcugaugaggccguuaggccgaaaagcccg

SEQ ID NO: 1786 - RNA, 36 nt, Artificial Sequence
  Description of Artificial Sequence:  Enzymatic Nucleic Acid Molecule
guauugucugaugaggccguuaggccgaaaccacca

SEQ ID NO: 1787 - RNA, 36 nt, Artificial Sequence
  Description of Artificial Sequence:  Enzymatic Nucleic Acid Molecule
aguauugcugaugaggccguuaggccgaaaaccacc

SEQ ID NO: 1788 - RNA, 36 nt, Artificial Sequence
  Description of Artificial Sequence:  Enzymatic Nucleic Acid Molecule
gauaaagcugaugaggccguuaggccgaaauuguaa

SEQ ID NO: 1789 - RNA, 36 nt, Artificial Sequence
  Description of Artificial Sequence:  Enzymatic Nucleic Acid Molecule
ggugauacugaugaggccguuaggccgaaaguauug

SEQ ID NO: 1790 - RNA, 36 nt, Artificial Sequence
  Description of Artificial Sequence:  Enzymatic Nucleic Acid Molecule
uggugaucugaugaggccguuaggccgaaaaguauu

SEQ ID NO: 1791 - RNA, 36 nt, Artificial Sequence
  Description of Artificial Sequence:  Enzymatic Nucleic Acid Molecule
acgcacacugaugaggccguuaggccgaaaugcgcc

SEQ ID NO: 1792 - RNA, 36 nt, Artificial Sequence
  Description of Artificial Sequence:  Enzymatic Nucleic Acid Molecule
cacgcaccugaugaggccguuaggccgaaaaugcgc

SEQ ID NO: 1793 - RNA, 36 nt, Artificial Sequence
  Description of Artificial Sequence:  Enzymatic Nucleic Acid Molecule
gagggggcugaugaggccguuaggccgaaacccaca

SEQ ID NO: 1794 - RNA, 36 nt, Artificial Sequence
  Description of Artificial Sequence:  Enzymatic Nucleic Acid Molecule
acauugacugaugaggccguuaggccgaaagggggg

SEQ ID NO: 1795 - RNA, 36 nt, Artificial Sequence
  Description of Artificial Sequence:  Enzymatic Nucleic Acid Molecule
ggacauucugaugaggccguuaggccgaaagagggg

SEQ ID NO: 1796 - RNA, 36 nt, Artificial Sequence
  Description of Artificial Sequence:  Enzymatic Nucleic Acid Molecule
ccccccgcugaugaggccguuaggccgaaacauuga

SEQ ID NO: 1797 - RNA, 36 nt, Artificial Sequence
  Description of Artificial Sequence:  Enzymatic Nucleic Acid Molecule
aggaugacugaugaggccguuaggccgaaagcaucg

SEQ ID NO: 1798 - RNA, 36 nt, Artificial Sequence
  Description of Artificial Sequence:  Enzymatic Nucleic Acid Molecule
ggaggaucugaugaggccguuaggccgaaauagcau

SEQ ID NO: 1799 - RNA, 36 nt, Artificial Sequence
  Description of Artificial Sequence:  Enzymatic Nucleic Acid Molecule
ugaggagcugaugaggccguuaggccgaaaugauag

SEQ ID NO: 1800 - RNA, 36 nt, Artificial Sequence
  Description of Artificial Sequence:  Enzymatic Nucleic Acid Molecule
augugagcugaugaggccguuaggccgaaaggauga

SEQ ID NO: 1801 - RNA, 36 nt, Artificial Sequence
  Description of Artificial Sequence:  Enzymatic Nucleic Acid Molecule
cacaugucugaugaggccguuaggccgaaaggagga

SEQ ID NO: 1802 - RNA, 36 nt, Artificial Sequence
  Description of Artificial Sequence:  Enzymatic Nucleic Acid Molecule
ucgcagucugaugaggccguuaggccgaaauggcag

SEQ ID NO: 1803 - RNA, 36 nt, Artificial Sequence
  Description of Artificial Sequence:  Enzymatic Nucleic Acid Molecule
uggacgucugaugaggccguuaggccgaaauggccu

SEQ ID NO: 1804 - RNA, 36 nt, Artificial Sequence
  Description of Artificial Sequence:  Enzymatic Nucleic Acid Molecule
uuggacgcugaugaggccguuaggccgaaaauggcc

SEQ ID NO: 1805 - RNA, 36 nt, Artificial Sequence
  Description of Artificial Sequence:  Enzymatic Nucleic Acid Molecule
ccauuugcugaugaggccguuaggccgaaacguaau

SEQ ID NO: 1806 - RNA, 36 nt, Artificial Sequence
  Description of Artificial Sequence:  Enzymatic Nucleic Acid Molecule
cuucaugcugaugaggccguuaggccgaaaggccau

SEQ ID NO: 1807 - RNA, 36 nt, Artificial Sequence
  Description of Artificial Sequence:  Enzymatic Nucleic Acid Molecule
gcuucaucugaugaggccguuaggccgaaaaggcca

SEQ ID NO: 1808 - RNA, 36 nt, Artificial Sequence
  Description of Artificial Sequence:  Enzymatic Nucleic Acid Molecule
aauccugcugaugaggccguuaggccgaaagcgggg

SEQ ID NO: 1809 - RNA, 36 nt, Artificial Sequence
  Description of Artificial Sequence:  Enzymatic Nucleic Acid Molecule
ugggccccugaugaggccguuaggccgaaauccugu

SEQ ID NO: 1810 - RNA, 36 nt, Artificial Sequence
  Description of Artificial Sequence:  Enzymatic Nucleic Acid Molecule
ggucucgcugaugaggccguuaggccgaaaggcccg

SEQ ID NO: 1811 - RNA, 36 nt, Artificial Sequence
  Description of Artificial Sequence:  Enzymatic Nucleic Acid Molecule
ccaccgccugaugaggccguuaggccgaaaggucuc

SEQ ID NO: 1812 - RNA, 36 nt, Artificial Sequence
  Description of Artificial Sequence:  Enzymatic Nucleic Acid Molecule
agaagaccugaugaggccguuaggccgaaacgggcu

SEQ ID NO: 1813 - RNA, 36 nt, Artificial Sequence
  Description of Artificial Sequence:  Enzymatic Nucleic Acid Molecule
cagagaacugaugaggccguuaggccgaaacgacgg

SEQ ID NO: 1814 - RNA, 36 nt, Artificial Sequence
  Description of Artificial Sequence:  Enzymatic Nucleic Acid Molecule
gucagagcugaugaggccguuaggccgaaagacgac

SEQ ID NO: 1815 - RNA, 36 nt, Artificial Sequence
  Description of Artificial Sequence:  Enzymatic Nucleic Acid Molecule
aggugaucugaugaggccguuaggccgaaaucuugg

SEQ ID NO: 1816 - RNA, 36 nt, Artificial Sequence
  Description of Artificial Sequence:  Enzymatic Nucleic Acid Molecule
cccaggucugaugaggccguuaggccgaaaugaucu

SEQ ID NO: 1817 - RNA, 36 nt, Artificial Sequence
  Description of Artificial Sequence:  Enzymatic Nucleic Acid Molecule
ccaagaucugaugaggccguuaggccgaaauguccc

SEQ ID NO: 1818 - RNA, 36 nt, Artificial Sequence
  Description of Artificial Sequence:  Enzymatic Nucleic Acid Molecule
gucccaacugaugaggccguuaggccgaaaugaugu

SEQ ID NO: 1819 - RNA, 36 nt, Artificial Sequence
  Description of Artificial Sequence:  Enzymatic Nucleic Acid Molecule
caguccccugaugaggccguuaggccgaaagaugau

SEQ ID NO: 1820 - RNA, 36 nt, Artificial Sequence
  Description of Artificial Sequence:  Enzymatic Nucleic Acid Molecule
gggcggacugaugaggccguuaggccgaaacgggca

SEQ ID NO: 1821 - RNA, 36 nt, Artificial Sequence
  Description of Artificial Sequence:  Enzymatic Nucleic Acid Molecule
ucgggcgcugaugaggccguuaggccgaaagacggg

SEQ ID NO: 1822 - RNA, 36 nt, Artificial Sequence
  Description of Artificial Sequence:  Enzymatic Nucleic Acid Molecule
ccagaagcugaugaggccguuaggccgaaaucuccc

SEQ ID NO: 1823 - RNA, 36 nt, Artificial Sequence
  Description of Artificial Sequence:  Enzymatic Nucleic Acid Molecule
gggcaagcugaugaggccguuaggccgaaagucgcc

SEQ ID NO: 1824 - RNA, 36 nt, Artificial Sequence
  Description of Artificial Sequence:  Enzymatic Nucleic Acid Molecule
ugggggccugaugaggccguuaggccgaaaggaguc

SEQ ID NO: 1825 - RNA, 36 nt, Artificial Sequence
  Description of Artificial Sequence:  Enzymatic Nucleic Acid Molecule
aggccgucugaugaggccguuaggccgaaauggggg

SEQ ID NO: 1826 - RNA, 36 nt, Artificial Sequence
  Description of Artificial Sequence:  Enzymatic Nucleic Acid Molecule
ggccugucugaugaggccguuaggccgaaaggcuag

SEQ ID NO: 1827 - RNA, 36 nt, Artificial Sequence
  Description of Artificial Sequence:  Enzymatic Nucleic Acid Molecule
ccacuugcugaugaggccguuaggccgaaaccuccc

SEQ ID NO: 1828 - RNA, 36 nt, Artificial Sequence
  Description of Artificial Sequence:  Enzymatic Nucleic Acid Molecule
accacuucugaugaggccguuaggccgaaaaccucc

SEQ ID NO: 1829 - RNA, 36 nt, Artificial Sequence
  Description of Artificial Sequence:  Enzymatic Nucleic Acid Molecule
cgguggacugaugaggccguuaggccgaaaccacuu

SEQ ID NO: 1830 - RNA, 36 nt, Artificial Sequence
  Description of Artificial Sequence:  Enzymatic Nucleic Acid Molecule
gcgguggcugaugaggccguuaggccgaaaaccacu

SEQ ID NO: 1831 - RNA, 36 nt, Artificial Sequence
  Description of Artificial Sequence:  Enzymatic Nucleic Acid Molecule
ugcggugcugaugaggccguuaggccgaaaaaccac

SEQ ID NO: 1832 - RNA, 36 nt, Artificial Sequence
  Description of Artificial Sequence:  Enzymatic Nucleic Acid Molecule
acggucccugaugaggccguuaggccgaaacacaca

SEQ ID NO: 1833 - RNA, 36 nt, Artificial Sequence
  Description of Artificial Sequence:  Enzymatic Nucleic Acid Molecule
ggucuuucugaugaggccguuaggccgaaagccggc

SEQ ID NO: 1834 - RNA, 36 nt, Artificial Sequence
  Description of Artificial Sequence:  Enzymatic Nucleic Acid Molecule
ggccggccugaugaggccguuaggccgaaagggucu

SEQ ID NO: 1835 - RNA, 36 nt, Artificial Sequence
  Description of Artificial Sequence:  Enzymatic Nucleic Acid Molecule
gccccggcugaugaggccguuaggccgaaaggcgca

SEQ ID NO: 1836 - RNA, 36 nt, Artificial Sequence
  Description of Artificial Sequence:  Enzymatic Nucleic Acid Molecule
guaagggcugaugaggccguuaggccgaaacgcgcc

SEQ ID NO: 1837 - RNA, 36 nt, Artificial Sequence
  Description of Artificial Sequence:  Enzymatic Nucleic Acid Molecule
uguaaggcugaugaggccguuaggccgaaaacgcgc

SEQ ID NO: 1838 - RNA, 36 nt, Artificial Sequence
  Description of Artificial Sequence:  Enzymatic Nucleic Acid Molecule
auggugucugaugaggccguuaggccgaaagggaac

SEQ ID NO: 1839 - RNA, 36 nt, Artificial Sequence
  Description of Artificial Sequence:  Enzymatic Nucleic Acid Molecule
cauggugcugaugaggccguuaggccgaaaagggaa

SEQ ID NO: 1840 - RNA, 36 nt, Artificial Sequence
  Description of Artificial Sequence:  Enzymatic Nucleic Acid Molecule
gaggucccugaugaggccguuaggccgaaagcuacc

SEQ ID NO: 1841 - RNA, 36 nt, Artificial Sequence
  Description of Artificial Sequence:  Enzymatic Nucleic Acid Molecule
ccagauacugaugaggccguuaggccgaaagguccg

SEQ ID NO: 1842 - RNA, 36 nt, Artificial Sequence
  Description of Artificial Sequence:  Enzymatic Nucleic Acid Molecule
gaccagacugaugaggccguuaggccgaaagagguc

SEQ ID NO: 1843 - RNA, 36 nt, Artificial Sequence
  Description of Artificial Sequence:  Enzymatic Nucleic Acid Molecule
gugaccacugaugaggccguuaggccgaaauagagg

SEQ ID NO: 1844 - RNA, 36 nt, Artificial Sequence
  Description of Artificial Sequence:  Enzymatic Nucleic Acid Molecule
gucucgucugaugaggccguuaggccgaaaccagau

SEQ ID NO: 1845 - RNA, 36 nt, Artificial Sequence
  Description of Artificial Sequence:  Enzymatic Nucleic Acid Molecule
gcaccggcugaugaggccguuaggccgaaaugacgu

SEQ ID NO: 1846 - RNA, 36 nt, Artificial Sequence
  Description of Artificial Sequence:  Enzymatic Nucleic Acid Molecule
cgcaccgcugaugaggccguuaggccgaaaaugacg

SEQ ID NO: 1847 - RNA, 36 nt, Artificial Sequence
  Description of Artificial Sequence:  Enzymatic Nucleic Acid Molecule
cuccccccugaugaggccguuaggccgaaaccguca

SEQ ID NO: 1848 - RNA, 36 nt, Artificial Sequence
  Description of Artificial Sequence:  Enzymatic Nucleic Acid Molecule
gggacagcugaugaggccguuaggccgaaaggcucc

SEQ ID NO: 1849 - RNA, 36 nt, Artificial Sequence
  Description of Artificial Sequence:  Enzymatic Nucleic Acid Molecule
ucuggggcugaugaggccguuaggccgaaacaguag

SEQ ID NO: 1850 - RNA, 36 nt, Artificial Sequence
  Description of Artificial Sequence:  Enzymatic Nucleic Acid Molecule
gccaccccugaugaggccguuaggccgaaaagagcc

SEQ ID NO: 1851 - RNA, 36 nt, Artificial Sequence
  Description of Artificial Sequence:  Enzymatic Nucleic Acid Molecule
aagggcacugaugaggccguuaggccgaaagcagug

SEQ ID NO: 1852 - RNA, 36 nt, Artificial Sequence
  Description of Artificial Sequence:  Enzymatic Nucleic Acid Molecule
ugccccgcugaugaggccguuaggccgaaagggcag

SEQ ID NO: 1853 - RNA, 36 nt, Artificial Sequence
  Description of Artificial Sequence:  Enzymatic Nucleic Acid Molecule
gugcccccugaugaggccguuaggccgaaaagggca

SEQ ID NO: 1854 - RNA, 36 nt, Artificial Sequence
  Description of Artificial Sequence:  Enzymatic Nucleic Acid Molecule
agaugcccugaugaggccguuaggccgaaacagcgu

SEQ ID NO: 1855 - RNA, 36 nt, Artificial Sequence
  Description of Artificial Sequence:  Enzymatic Nucleic Acid Molecule
cccggaacugaugaggccguuaggccgaaaugccua

SEQ ID NO: 1856 - RNA, 36 nt, Artificial Sequence
  Description of Artificial Sequence:  Enzymatic Nucleic Acid Molecule
agcccggcugaugaggccguuaggccgaaagaugcc

SEQ ID NO: 1857 - RNA, 36 nt, Artificial Sequence
  Description of Artificial Sequence:  Enzymatic Nucleic Acid Molecule
cagcccgcugaugaggccguuaggccgaaaagaugc

SEQ ID NO: 1858 - RNA, 36 nt, Artificial Sequence
  Description of Artificial Sequence:  Enzymatic Nucleic Acid Molecule
ccuucgccugaugaggccguuaggccgaaacccccc

SEQ ID NO: 1859 - RNA, 36 nt, Artificial Sequence
  Description of Artificial Sequence:  Enzymatic Nucleic Acid Molecule
ggcacuucugaugaggccguuaggccgaaagugcuc

SEQ ID NO: 1860 - RNA, 36 nt, Artificial Sequence
  Description of Artificial Sequence:  Enzymatic Nucleic Acid Molecule
ggcugcgcugaugaggccguuaggccgaaacgcagc

SEQ ID NO: 1861 - RNA, 36 nt, Artificial Sequence
  Description of Artificial Sequence:  Enzymatic Nucleic Acid Molecule
uaccuugcugaugaggccguuaggccgaaacccuug

SEQ ID NO: 1862 - RNA, 36 nt, Artificial Sequence
  Description of Artificial Sequence:  Enzymatic Nucleic Acid Molecule
uggcggccugaugaggccguuaggccgaaacagaug

SEQ ID NO: 1863 - RNA, 36 nt, Artificial Sequence
  Description of Artificial Sequence:  Enzymatic Nucleic Acid Molecule
caguucucugaugaggccguuaggccgaaauguugg

SEQ ID NO: 1864 - RNA, 36 nt, Artificial Sequence
  Description of Artificial Sequence:  Enzymatic Nucleic Acid Molecule
ugguccucugaugaggccguuaggccgaaaccccag

SEQ ID NO: 1865 - RNA, 36 nt, Artificial Sequence
  Description of Artificial Sequence:  Enzymatic Nucleic Acid Molecule
cuuaccacugaugaggccguuaggccgaaaggugga

SEQ ID NO: 1866 - RNA, 36 nt, Artificial Sequence
  Description of Artificial Sequence:  Enzymatic Nucleic Acid Molecule
aggaacucugaugaggccguuaggccgaaaccauag

SEQ ID NO: 1867 - RNA, 36 nt, Artificial Sequence
  Description of Artificial Sequence:  Enzymatic Nucleic Acid Molecule
ggcaaggcugaugaggccguuaggccgaaacuuacc

SEQ ID NO: 1868 - RNA, 36 nt, Artificial Sequence
  Description of Artificial Sequence:  Enzymatic Nucleic Acid Molecule
cggcaagcugaugaggccguuaggccgaaaacuuac

SEQ ID NO: 1869 - RNA, 36 nt, Artificial Sequence
  Description of Artificial Sequence:  Enzymatic Nucleic Acid Molecule
cgucggccugaugaggccguuaggccgaaaggaacu

SEQ ID NO: 1870 - RNA, 36 nt, Artificial Sequence
  Description of Artificial Sequence:  Enzymatic Nucleic Acid Molecule
cacauaucugaugaggccguuaggccgaaaugauau

SEQ ID NO: 1871 - RNA, 36 nt, Artificial Sequence
  Description of Artificial Sequence:  Enzymatic Nucleic Acid Molecule
caucacacugaugaggccguuaggccgaaauuauga

SEQ ID NO: 1872 - RNA, 36 nt, Artificial Sequence
  Description of Artificial Sequence:  Enzymatic Nucleic Acid Molecule
gguccagcugaugaggccguuaggccgaaacugugc

SEQ ID NO: 1873 - RNA, 36 nt, Artificial Sequence
  Description of Artificial Sequence:  Enzymatic Nucleic Acid Molecule
gcacgaccugaugaggccguuaggccgaaagccgcg

SEQ ID NO: 1874 - RNA, 36 nt, Artificial Sequence
  Description of Artificial Sequence:  Enzymatic Nucleic Acid Molecule
cgagcaccugaugaggccguuaggccgaaacgagcc

SEQ ID NO: 1875 - RNA, 36 nt, Artificial Sequence
  Description of Artificial Sequence:  Enzymatic Nucleic Acid Molecule
cgguggccugaugaggccguuaggccgaaagcacga

SEQ ID NO: 1876 - RNA, 36 nt, Artificial Sequence
  Description of Artificial Sequence:  Enzymatic Nucleic Acid Molecule
uccucaacugaugaggccguuaggccgaaauuuggg

SEQ ID NO: 1877 - RNA, 36 nt, Artificial Sequence
  Description of Artificial Sequence:  Enzymatic Nucleic Acid Molecule
aguguugcugaugaggccguuaggccgaaacagagc

SEQ ID NO: 1878 - RNA, 36 nt, Artificial Sequence
  Description of Artificial Sequence:  Enzymatic Nucleic Acid Molecule
agaagggcugaugaggccguuaggccgaaaucucuc

SEQ ID NO: 1879 - RNA, 36 nt, Artificial Sequence
  Description of Artificial Sequence:  Enzymatic Nucleic Acid Molecule
cgaggggcugaugaggccguuaggccgaaauggccu

SEQ ID NO: 1880 - RNA, 36 nt, Artificial Sequence
  Description of Artificial Sequence:  Enzymatic Nucleic Acid Molecule
uggccuccugaugaggccguuaggccgaaaggggga

SEQ ID NO: 1881 - RNA, 36 nt, Artificial Sequence
  Description of Artificial Sequence:  Enzymatic Nucleic Acid Molecule
cccccuucugaugaggccguuaggccgaaauggccu

SEQ ID NO: 1882 - RNA, 36 nt, Artificial Sequence
  Description of Artificial Sequence:  Enzymatic Nucleic Acid Molecule
cuucuugcugaugaggccguuaggccgaaaguggca

SEQ ID NO: 1883 - RNA, 36 nt, Artificial Sequence
  Description of Artificial Sequence:  Enzymatic Nucleic Acid Molecule
cggcauucugaugaggccguuaggccgaaauuccga

SEQ ID NO: 1884 - RNA, 36 nt, Artificial Sequence
  Description of Artificial Sequence:  Enzymatic Nucleic Acid Molecule
aauacgccugaugaggccguuaggccgaaacggcau

SEQ ID NO: 1885 - RNA, 36 nt, Artificial Sequence
  Description of Artificial Sequence:  Enzymatic Nucleic Acid Molecule
ccgguaacugaugaggccguuaggccgaaacgcuac

SEQ ID NO: 1886 - RNA, 36 nt, Artificial Sequence
  Description of Artificial Sequence:  Enzymatic Nucleic Acid Molecule
ccccggucugaugaggccguuaggccgaaauacgcu

SEQ ID NO: 1887 - RNA, 36 nt, Artificial Sequence
  Description of Artificial Sequence:  Enzymatic Nucleic Acid Molecule
accccggcugaugaggccguuaggccgaaaauacgc

SEQ ID NO: 1888 - RNA, 36 nt, Artificial Sequence
  Description of Artificial Sequence:  Enzymatic Nucleic Acid Molecule
ucgguaucugaugaggccguuaggccgaaacggaca

SEQ ID NO: 1889 - RNA, 36 nt, Artificial Sequence
  Description of Artificial Sequence:  Enzymatic Nucleic Acid Molecule
uagucggcugaugaggccguuaggccgaaaugacgg

SEQ ID NO: 1890 - RNA, 36 nt, Artificial Sequence
  Description of Artificial Sequence:  Enzymatic Nucleic Acid Molecule
ucuccgccugaugaggccguuaggccgaaagucggu

SEQ ID NO: 1891 - RNA, 36 nt, Artificial Sequence
  Description of Artificial Sequence:  Enzymatic Nucleic Acid Molecule
accggugcugaugaggccguuaggccgaaagcccgu

SEQ ID NO: 1892 - RNA, 36 nt, Artificial Sequence
  Description of Artificial Sequence:  Enzymatic Nucleic Acid Molecule
ugcaguccugaugaggccguuaggccgaaaucaccg

SEQ ID NO: 1893 - RNA, 36 nt, Artificial Sequence
  Description of Artificial Sequence:  Enzymatic Nucleic Acid Molecule
ugagcgccugaugaggccguuaggccgaaacaccgc

SEQ ID NO: 1894 - RNA, 36 nt, Artificial Sequence
  Description of Artificial Sequence:  Enzymatic Nucleic Acid Molecule
ccguugucugaugaggccguuaggccgaaagcgcga

SEQ ID NO: 1895 - RNA, 36 nt, Artificial Sequence
  Description of Artificial Sequence:  Enzymatic Nucleic Acid Molecule
ucauacccugaugaggccguuaggccgaaagcacag

SEQ ID NO: 1896 - RNA, 36 nt, Artificial Sequence
  Description of Artificial Sequence:  Enzymatic Nucleic Acid Molecule
gagcucacugaugaggccguuaggccgaaaccaagc

SEQ ID NO: 1897 - RNA, 36 nt, Artificial Sequence
  Description of Artificial Sequence:  Enzymatic Nucleic Acid Molecule
cgggcgucugaugaggccguuaggccgaaagcucau

SEQ ID NO: 1898 - RNA, 36 nt, Artificial Sequence
  Description of Artificial Sequence:  Enzymatic Nucleic Acid Molecule
cugacugcugaugaggccguuaggccgaaagucuca

SEQ ID NO: 1899 - RNA, 36 nt, Artificial Sequence
  Description of Artificial Sequence:  Enzymatic Nucleic Acid Molecule
gcaaccucugaugaggccguuaggccgaaacuguag

SEQ ID NO: 1900 - RNA, 36 nt, Artificial Sequence
  Description of Artificial Sequence:  Enzymatic Nucleic Acid Molecule
agcccgccugaugaggccguuaggccgaaaccugac

SEQ ID NO: 1901 - RNA, 36 nt, Artificial Sequence
  Description of Artificial Sequence:  Enzymatic Nucleic Acid Molecule
uucaggucugaugaggccguuaggccgaaagcccgc

SEQ ID NO: 1902 - RNA, 36 nt, Artificial Sequence
  Description of Artificial Sequence:  Enzymatic Nucleic Acid Molecule
auucaggcugaugaggccguuaggccgaaaagcccg

SEQ ID NO: 1903 - RNA, 36 nt, Artificial Sequence
  Description of Artificial Sequence:  Enzymatic Nucleic Acid Molecule
ccuggugcugaugaggccguuaggccgaaauucagg

SEQ ID NO: 1904 - RNA, 36 nt, Artificial Sequence
  Description of Artificial Sequence:  Enzymatic Nucleic Acid Molecule
gacgggccugaugaggccguuaggccgaaacccugg

SEQ ID NO: 1905 - RNA, 36 nt, Artificial Sequence
  Description of Artificial Sequence:  Enzymatic Nucleic Acid Molecule
ccuggcacugaugaggccguuaggccgaaacgggca

SEQ ID NO: 1906 - RNA, 36 nt, Artificial Sequence
  Description of Artificial Sequence:  Enzymatic Nucleic Acid Molecule
aacuccacugaugaggccguuaggccgaaauggucc

SEQ ID NO: 1907 - RNA, 36 nt, Artificial Sequence
  Description of Artificial Sequence:  Enzymatic Nucleic Acid Molecule
gguaugccugaugaggccguuaggccgaaaccaggu

SEQ ID NO: 1908 - RNA, 36 nt, Artificial Sequence
  Description of Artificial Sequence:  Enzymatic Nucleic Acid Molecule
ggcuuggcugaugaggccguuaggccgaaaugcuac

SEQ ID NO: 1909 - RNA, 36 nt, Artificial Sequence
  Description of Artificial Sequence:  Enzymatic Nucleic Acid Molecule
ggagccucugaugaggccguuaggccgaaagcccug

SEQ ID NO: 1910 - RNA, 36 nt, Artificial Sequence
  Description of Artificial Sequence:  Enzymatic Nucleic Acid Molecule
uagccuacugaugaggccguuaggccgaaacagcag

SEQ ID NO: 1911 - RNA, 36 nt, Artificial Sequence
  Description of Artificial Sequence:  Enzymatic Nucleic Acid Molecule
ccuagcccugaugaggccguuaggccgaaauacagc

SEQ ID NO: 1912 - RNA, 36 nt, Artificial Sequence
  Description of Artificial Sequence:  Enzymatic Nucleic Acid Molecule
uagugaccugaugaggccguuaggccgaaaccucca

SEQ ID NO: 1913 - RNA, 36 nt, Artificial Sequence
  Description of Artificial Sequence:  Enzymatic Nucleic Acid Molecule
ugcuagucugaugaggccguuaggccgaaacgaccu

SEQ ID NO: 1914 - RNA, 36 nt, Artificial Sequence
  Description of Artificial Sequence:  Enzymatic Nucleic Acid Molecule
caggugccugaugaggccguuaggccgaaagugacg

SEQ ID NO: 1915 - RNA, 36 nt, Artificial Sequence
  Description of Artificial Sequence:  Enzymatic Nucleic Acid Molecule
cuccgcccugaugaggccguuaggccgaaaccagca

SEQ ID NO: 1916 - RNA, 36 nt, Artificial Sequence
  Description of Artificial Sequence:  Enzymatic Nucleic Acid Molecule
cugcaagcugaugaggccguuaggccgaaacuccgc

SEQ ID NO: 1917 - RNA, 36 nt, Artificial Sequence
  Description of Artificial Sequence:  Enzymatic Nucleic Acid Molecule
gagcugccugaugaggccguuaggccgaaaggacuc

SEQ ID NO: 1918 - RNA, 36 nt, Artificial Sequence
  Description of Artificial Sequence:  Enzymatic Nucleic Acid Molecule
caggcaacugaugaggccguuaggccgaaaugcggc

SEQ ID NO: 1919 - RNA, 36 nt, Artificial Sequence
  Description of Artificial Sequence:  Enzymatic Nucleic Acid Molecule
gucaggccugaugaggccguuaggccgaaauaugcg

SEQ ID NO: 1920 - RNA, 36 nt, Artificial Sequence
  Description of Artificial Sequence:  Enzymatic Nucleic Acid Molecule
accacaccugaugaggccguuaggccgaaaccgguu

SEQ ID NO: 1921 - RNA, 36 nt, Artificial Sequence
  Description of Artificial Sequence:  Enzymatic Nucleic Acid Molecule
acaaaaucugaugaggccguuaggccgaaauccuac

SEQ ID NO: 1922 - RNA, 36 nt, Artificial Sequence
  Description of Artificial Sequence:  Enzymatic Nucleic Acid Molecule
cgggaaccugaugaggccguuaggccgaaacagccg

SEQ ID NO: 1923 - RNA, 36 nt, Artificial Sequence
  Description of Artificial Sequence:  Enzymatic Nucleic Acid Molecule
ugucgggcugaugaggccguuaggccgaaacaacag

SEQ ID NO: 1924 - RNA, 36 nt, Artificial Sequence
  Description of Artificial Sequence:  Enzymatic Nucleic Acid Molecule
cugucggcugaugaggccguuaggccgaaaacaaca

SEQ ID NO: 1925 - RNA, 36 nt, Artificial Sequence
  Description of Artificial Sequence:  Enzymatic Nucleic Acid Molecule
cugcuugcugaugaggccguuaggccgaaacugcuc

SEQ ID NO: 1926 - RNA, 36 nt, Artificial Sequence
  Description of Artificial Sequence:  Enzymatic Nucleic Acid Molecule
ucugcuucugaugaggccguuaggccgaaaacugcu

SEQ ID NO: 1927 - RNA, 36 nt, Artificial Sequence
  Description of Artificial Sequence:  Enzymatic Nucleic Acid Molecule
accacggcugaugaggccguuaggccgaaagcagcg

SEQ ID NO: 1928 - RNA, 36 nt, Artificial Sequence
  Description of Artificial Sequence:  Enzymatic Nucleic Acid Molecule
ccaccugcugaugaggccguuaggccgaaacuccac

SEQ ID NO: 1929 - RNA, 36 nt, Artificial Sequence
  Description of Artificial Sequence:  Enzymatic Nucleic Acid Molecule
aggccuccugaugaggccguuaggccgaaagggccc

SEQ ID NO: 1930 - RNA, 36 nt, Artificial Sequence
  Description of Artificial Sequence:  Enzymatic Nucleic Acid Molecule
ugcccagcugaugaggccguuaggccgaaaggccuc

SEQ ID NO: 1931 - RNA, 36 nt, Artificial Sequence
  Description of Artificial Sequence:  Enzymatic Nucleic Acid Molecule
uugcccacugaugaggccguuaggccgaaaaggccu

SEQ ID NO: 1932 - RNA, 36 nt, Artificial Sequence
  Description of Artificial Sequence:  Enzymatic Nucleic Acid Molecule
aguggaucugaugaggccguuaggccgaaagccugc

SEQ ID NO: 1933 - RNA, 36 nt, Artificial Sequence
  Description of Artificial Sequence:  Enzymatic Nucleic Acid Molecule
gaguggacugaugaggccguuaggccgaaaagccug

SEQ ID NO: 1934 - RNA, 36 nt, Artificial Sequence
  Description of Artificial Sequence:  Enzymatic Nucleic Acid Molecule
gauguugcugaugaggccguuaggccgaaacaggag

SEQ ID NO: 1935 - RNA, 36 nt, Artificial Sequence
  Description of Artificial Sequence:  Enzymatic Nucleic Acid Molecule
agauguucugaugaggccguuaggccgaaaacagga

SEQ ID NO: 1936 - RNA, 36 nt, Artificial Sequence
  Description of Artificial Sequence:  Enzymatic Nucleic Acid Molecule
gaggagccugaugaggccguuaggccgaaaguugag

SEQ ID NO: 1937 - RNA, 36 nt, Artificial Sequence
  Description of Artificial Sequence:  Enzymatic Nucleic Acid Molecule
cugggagcugaugaggccguuaggccgaaagcgagu

SEQ ID NO: 1938 - RNA, 36 nt, Artificial Sequence
  Description of Artificial Sequence:  Enzymatic Nucleic Acid Molecule
gaaggcccugaugaggccguuaggccgaaaagcagc

SEQ ID NO: 1939 - RNA, 36 nt, Artificial Sequence
  Description of Artificial Sequence:  Enzymatic Nucleic Acid Molecule
gcccacgcugaugaggccguuaggccgaaaggccga

SEQ ID NO: 1940 - RNA, 36 nt, Artificial Sequence
  Description of Artificial Sequence:  Enzymatic Nucleic Acid Molecule
cgcccaccugaugaggccguuaggccgaaaaggccg

SEQ ID NO: 1941 - RNA, 36 nt, Artificial Sequence
  Description of Artificial Sequence:  Enzymatic Nucleic Acid Molecule
caccggccugaugaggccguuaggccgaaaugccgg

SEQ ID NO: 1942 - RNA, 36 nt, Artificial Sequence
  Description of Artificial Sequence:  Enzymatic Nucleic Acid Molecule
ugcugcccugaugaggccguuaggccgaaauggccg

SEQ ID NO: 1943 - RNA, 36 nt, Artificial Sequence
  Description of Artificial Sequence:  Enzymatic Nucleic Acid Molecule
caaggcccugaugaggccguuaggccgaaaugcugc

SEQ ID NO: 1944 - RNA, 36 nt, Artificial Sequence
  Description of Artificial Sequence:  Enzymatic Nucleic Acid Molecule
ccuuccccugaugaggccguuaggccgaaaggccua

SEQ ID NO: 1945 - RNA, 36 nt, Artificial Sequence
  Description of Artificial Sequence:  Enzymatic Nucleic Acid Molecule
cgcuccacugaugaggccguuaggccgaaagcccgc

SEQ ID NO: 1946 - RNA, 36 nt, Artificial Sequence
  Description of Artificial Sequence:  Enzymatic Nucleic Acid Molecule
aagccaccugaugaggccguuaggccgaaagugcac

SEQ ID NO: 1947 - RNA, 36 nt, Artificial Sequence
  Description of Artificial Sequence:  Enzymatic Nucleic Acid Molecule
accuuaacugaugaggccguuaggccgaaagccacg

SEQ ID NO: 1948 - RNA, 36 nt, Artificial Sequence
  Description of Artificial Sequence:  Enzymatic Nucleic Acid Molecule
gaccuuacugaugaggccguuaggccgaaaagccac

SEQ ID NO: 1949 - RNA, 36 nt, Artificial Sequence
  Description of Artificial Sequence:  Enzymatic Nucleic Acid Molecule
ugaccuucugaugaggccguuaggccgaaaaagcca

SEQ ID NO: 1950 - RNA, 36 nt, Artificial Sequence
  Description of Artificial Sequence:  Enzymatic Nucleic Acid Molecule
augaccucugaugaggccguuaggccgaaaaaagcc

SEQ ID NO: 1951 - RNA, 36 nt, Artificial Sequence
  Description of Artificial Sequence:  Enzymatic Nucleic Acid Molecule
cgcucaucugaugaggccguuaggccgaaaccuuaa

SEQ ID NO: 1952 - RNA, 36 nt, Artificial Sequence
  Description of Artificial Sequence:  Enzymatic Nucleic Acid Molecule
cucggcgcugaugaggccguuaggccgaaagggcgc

SEQ ID NO: 1953 - RNA, 36 nt, Artificial Sequence
  Description of Artificial Sequence:  Enzymatic Nucleic Acid Molecule
gcaaguucugaugaggccguuaggccgaaaccaggu

SEQ ID NO: 1954 - RNA, 36 nt, Artificial Sequence
  Description of Artificial Sequence:  Enzymatic Nucleic Acid Molecule
agcaagucugaugaggccguuaggccgaaaaccagg

SEQ ID NO: 1955 - RNA, 36 nt, Artificial Sequence
  Description of Artificial Sequence:  Enzymatic Nucleic Acid Molecule
uggcaggcugaugaggccguuaggccgaaagcaagu

SEQ ID NO: 1956 - RNA, 36 nt, Artificial Sequence
  Description of Artificial Sequence:  Enzymatic Nucleic Acid Molecule
gccggggcugaugaggccguuaggccgaaagaggau

SEQ ID NO: 1957 - RNA, 36 nt, Artificial Sequence
  Description of Artificial Sequence:  Enzymatic Nucleic Acid Molecule
ccccgaccugaugaggccguuaggccgaaaccaggg

SEQ ID NO: 1958 - RNA, 36 nt, Artificial Sequence
  Description of Artificial Sequence:  Enzymatic Nucleic Acid Molecule
cgacccccugaugaggccguuaggccgaaacgacca

SEQ ID NO: 1959 - RNA, 36 nt, Artificial Sequence
  Description of Artificial Sequence:  Enzymatic Nucleic Acid Molecule
cacacaccugaugaggccguuaggccgaaaccccga

SEQ ID NO: 1960 - RNA, 36 nt, Artificial Sequence
  Description of Artificial Sequence:  Enzymatic Nucleic Acid Molecule
gacgcagcugaugaggccguuaggccgaaauugcug

SEQ ID NO: 1961 - RNA, 36 nt, Artificial Sequence
  Description of Artificial Sequence:  Enzymatic Nucleic Acid Molecule
acgugcccugaugaggccguuaggccgaaacgcagg

SEQ ID NO: 1962 - RNA, 36 nt, Artificial Sequence
  Description of Artificial Sequence:  Enzymatic Nucleic Acid Molecule
cgaagcgcugaugaggccguuaggccgaaacgcuau

SEQ ID NO: 1963 - RNA, 36 nt, Artificial Sequence
  Description of Artificial Sequence:  Enzymatic Nucleic Acid Molecule
gcgaagccugaugaggccguuaggccgaaaacgcua

SEQ ID NO: 1964 - RNA, 36 nt, Artificial Sequence
  Description of Artificial Sequence:  Enzymatic Nucleic Acid Molecule
ccccgcgcugaugaggccguuaggccgaaagcgaac

SEQ ID NO: 1965 - RNA, 36 nt, Artificial Sequence
  Description of Artificial Sequence:  Enzymatic Nucleic Acid Molecule
uuugcaucugaugaggccguuaggccgaaaugccgu

SEQ ID NO: 1966 - RNA, 36 nt, Artificial Sequence
  Description of Artificial Sequence:  Enzymatic Nucleic Acid Molecule
ccuggaacugaugaggccguuaggccgaaaguucgg

SEQ ID NO: 1967 - RNA, 36 nt, Artificial Sequence
  Description of Artificial Sequence:  Enzymatic Nucleic Acid Molecule
gcccuggcugaugaggccguuaggccgaaauaguuc

SEQ ID NO: 1968 - RNA, 36 nt, Artificial Sequence
  Description of Artificial Sequence:  Enzymatic Nucleic Acid Molecule
cgcccugcugaugaggccguuaggccgaaaauaguu

SEQ ID NO: 1969 - RNA, 36 nt, Artificial Sequence
  Description of Artificial Sequence:  Enzymatic Nucleic Acid Molecule
guaguggcugaugaggccguuaggccgaaagucccc

SEQ ID NO: 1970 - RNA, 36 nt, Artificial Sequence
  Description of Artificial Sequence:  Enzymatic Nucleic Acid Molecule
cguagugcugaugaggccguuaggccgaaaaguccc

SEQ ID NO: 1971 - RNA, 36 nt, Artificial Sequence
  Description of Artificial Sequence:  Enzymatic Nucleic Acid Molecule
cgucacgcugaugaggccguuaggccgaaaguggaa

SEQ ID NO: 1972 - RNA, 36 nt, Artificial Sequence
  Description of Artificial Sequence:  Enzymatic Nucleic Acid Molecule
ggcauuucugaugaggccguuaggccgaaacguugu

SEQ ID NO: 1973 - RNA, 36 nt, Artificial Sequence
  Description of Artificial Sequence:  Enzymatic Nucleic Acid Molecule
ggugaagcugaugaggccguuaggccgaaauucggg

SEQ ID NO: 1974 - RNA, 36 nt, Artificial Sequence
  Description of Artificial Sequence:  Enzymatic Nucleic Acid Molecule
cggugaacugaugaggccguuaggccgaaaauucgg

SEQ ID NO: 1975 - RNA, 36 nt, Artificial Sequence
  Description of Artificial Sequence:  Enzymatic Nucleic Acid Molecule
uucggugcugaugaggccguuaggccgaaagaauuc

SEQ ID NO: 1976 - RNA, 36 nt, Artificial Sequence
  Description of Artificial Sequence:  Enzymatic Nucleic Acid Molecule
auucggucugaugaggccguuaggccgaaaagaauu

SEQ ID NO: 1977 - RNA, 36 nt, Artificial Sequence
  Description of Artificial Sequence:  Enzymatic Nucleic Acid Molecule
cccgucccugaugaggccguuaggccgaaauucggu

SEQ ID NO: 1978 - RNA, 36 nt, Artificial Sequence
  Description of Artificial Sequence:  Enzymatic Nucleic Acid Molecule
ccugugccugaugaggccguuaggccgaaaccgcac

SEQ ID NO: 1979 - RNA, 36 nt, Artificial Sequence
  Description of Artificial Sequence:  Enzymatic Nucleic Acid Molecule
cggagcgcugaugaggccguuaggccgaaaccugug

SEQ ID NO: 1980 - RNA, 36 nt, Artificial Sequence
  Description of Artificial Sequence:  Enzymatic Nucleic Acid Molecule
cacgccgcugaugaggccguuaggccgaaagcguac

SEQ ID NO: 1981 - RNA, 36 nt, Artificial Sequence
  Description of Artificial Sequence:  Enzymatic Nucleic Acid Molecule
cguaggacugaugaggccguuaggccgaaaggucug

SEQ ID NO: 1982 - RNA, 36 nt, Artificial Sequence
  Description of Artificial Sequence:  Enzymatic Nucleic Acid Molecule
cccguagcugaugaggccguuaggccgaaagagguc

SEQ ID NO: 1983 - RNA, 36 nt, Artificial Sequence
  Description of Artificial Sequence:  Enzymatic Nucleic Acid Molecule
ccucccgcugaugaggccguuaggccgaaaggagag

SEQ ID NO: 1984 - RNA, 36 nt, Artificial Sequence
  Description of Artificial Sequence:  Enzymatic Nucleic Acid Molecule
ggaaugucugaugaggccguuaggccgaaacauccu

SEQ ID NO: 1985 - RNA, 36 nt, Artificial Sequence
  Description of Artificial Sequence:  Enzymatic Nucleic Acid Molecule
cgaccugcugaugaggccguuaggccgaaaauguga

SEQ ID NO: 1986 - RNA, 36 nt, Artificial Sequence
  Description of Artificial Sequence:  Enzymatic Nucleic Acid Molecule
ugagccccugaugaggccguuaggccgaaaccugga

SEQ ID NO: 1987 - RNA, 36 nt, Artificial Sequence
  Description of Artificial Sequence:  Enzymatic Nucleic Acid Molecule
auugguucugaugaggccguuaggccgaaagcccga

SEQ ID NO: 1988 - RNA, 36 nt, Artificial Sequence
  Description of Artificial Sequence:  Enzymatic Nucleic Acid Molecule
aaccaggcugaugaggccguuaggccgaaauugguu

SEQ ID NO: 1989 - RNA, 36 nt, Artificial Sequence
  Description of Artificial Sequence:  Enzymatic Nucleic Acid Molecule
gugaccccugaugaggccguuaggccgaaaccaggu

SEQ ID NO: 1990 - RNA, 36 nt, Artificial Sequence
  Description of Artificial Sequence:  Enzymatic Nucleic Acid Molecule
gagcugucugaugaggccguuaggccgaaacccaac

SEQ ID NO: 1991 - RNA, 36 nt, Artificial Sequence
  Description of Artificial Sequence:  Enzymatic Nucleic Acid Molecule
cgcauggcugaugaggccguuaggccgaaagcugug

SEQ ID NO: 1992 - RNA, 36 nt, Artificial Sequence
  Description of Artificial Sequence:  Enzymatic Nucleic Acid Molecule
gccagcccugaugaggccguuaggccgaaacguuua

SEQ ID NO: 1993 - RNA, 36 nt, Artificial Sequence
  Description of Artificial Sequence:  Enzymatic Nucleic Acid Molecule
ggggggacugaugaggccguuaggccgaaacccccu

SEQ ID NO: 1994 - RNA, 36 nt, Artificial Sequence
  Description of Artificial Sequence:  Enzymatic Nucleic Acid Molecule
gagggggcugaugaggccguuaggccgaaagacccc

SEQ ID NO: 1995 - RNA, 36 nt, Artificial Sequence
  Description of Artificial Sequence:  Enzymatic Nucleic Acid Molecule
ggccaagcugaugaggccguuaggccgaaagggggg

SEQ ID NO: 1996 - RNA, 36 nt, Artificial Sequence
  Description of Artificial Sequence:  Enzymatic Nucleic Acid Molecule
gcuggcccugaugaggccguuaggccgaaaggaggg

SEQ ID NO: 1997 - RNA, 36 nt, Artificial Sequence
  Description of Artificial Sequence:  Enzymatic Nucleic Acid Molecule
agcugaacugaugaggccguuaggccgaaagcuggc

SEQ ID NO: 1998 - RNA, 36 nt, Artificial Sequence
  Description of Artificial Sequence:  Enzymatic Nucleic Acid Molecule
cgcagaccugaugaggccguuaggccgaaauuggcu

SEQ ID NO: 1999 - RNA, 36 nt, Artificial Sequence
  Description of Artificial Sequence:  Enzymatic Nucleic Acid Molecule
aggcgcacugaugaggccguuaggccgaaacaauug

SEQ ID NO: 2000 - RNA, 36 nt, Artificial Sequence
  Description of Artificial Sequence:  Enzymatic Nucleic Acid Molecule
gccacagcugaugaggccguuaggccgaaagguugg

SEQ ID NO: 2001 - RNA, 36 nt, Artificial Sequence
  Description of Artificial Sequence:  Enzymatic Nucleic Acid Molecule
ccgcucgcugaugaggccguuaggccgaaagcgggu

SEQ ID NO: 2002 - RNA, 36 nt, Artificial Sequence
  Description of Artificial Sequence:  Enzymatic Nucleic Acid Molecule
uccgcuccugaugaggccguuaggccgaaaagcggg

SEQ ID NO: 2003 - RNA, 36 nt, Artificial Sequence
  Description of Artificial Sequence:  Enzymatic Nucleic Acid Molecule
caacggacugaugaggccguuaggccgaaacuuccc

SEQ ID NO: 2004 - RNA, 36 nt, Artificial Sequence
  Description of Artificial Sequence:  Enzymatic Nucleic Acid Molecule
uaugggccugaugaggccguuaggccgaaacgcggg

SEQ ID NO: 2005 - RNA, 36 nt, Artificial Sequence
  Description of Artificial Sequence:  Enzymatic Nucleic Acid Molecule
gugcccacugaugaggccguuaggccgaaaugggca

SEQ ID NO: 2006 - RNA, 36 nt, Artificial Sequence
  Description of Artificial Sequence:  Enzymatic Nucleic Acid Molecule
ggguugucugaugaggccguuaggccgaaauccggg

SEQ ID NO: 2007 - RNA, 36 nt, Artificial Sequence
  Description of Artificial Sequence:  Enzymatic Nucleic Acid Molecule
aggguugcugaugaggccguuaggccgaaaauccgg

SEQ ID NO: 2008 - RNA, 36 nt, Artificial Sequence
  Description of Artificial Sequence:  Enzymatic Nucleic Acid Molecule
ggacucucugaugaggccguuaggccgaaacagugg

SEQ ID NO: 2009 - RNA, 36 nt, Artificial Sequence
  Description of Artificial Sequence:  Enzymatic Nucleic Acid Molecule
aggacuccugaugaggccguuaggccgaaaacagug

SEQ ID NO: 2010 - RNA, 36 nt, Artificial Sequence
  Description of Artificial Sequence:  Enzymatic Nucleic Acid Molecule
uaguccgcugaugaggccguuaggccgaaacuuuuc

SEQ ID NO: 2011 - RNA, 36 nt, Artificial Sequence
  Description of Artificial Sequence:  Enzymatic Nucleic Acid Molecule
agggacgcugaugaggccguuaggccgaaaguccgg

SEQ ID NO: 2012 - RNA, 36 nt, Artificial Sequence
  Description of Artificial Sequence:  Enzymatic Nucleic Acid Molecule
ccggaggcugaugaggccguuaggccgaaacguagu

SEQ ID NO: 2013 - RNA, 36 nt, Artificial Sequence
  Description of Artificial Sequence:  Enzymatic Nucleic Acid Molecule
accgccgcugaugaggccguuaggccgaaagggacg

SEQ ID NO: 2014 - RNA, 36 nt, Artificial Sequence
  Description of Artificial Sequence:  Enzymatic Nucleic Acid Molecule
aggcggccugaugaggccguuaggccgaaaugggca

SEQ ID NO: 2015 - RNA, 36 nt, Artificial Sequence
  Description of Artificial Sequence:  Enzymatic Nucleic Acid Molecule
cccguggcugaugaggccguuaggccgaaaggcggc

SEQ ID NO: 2016 - RNA, 36 nt, Artificial Sequence
  Description of Artificial Sequence:  Enzymatic Nucleic Acid Molecule
cacggugcugaugaggccguuaggccgaaacucugu

SEQ ID NO: 2017 - RNA, 36 nt, Artificial Sequence
  Description of Artificial Sequence:  Enzymatic Nucleic Acid Molecule
gucuuagcugaugaggccguuaggccgaaagccagc

SEQ ID NO: 2018 - RNA, 36 nt, Artificial Sequence
  Description of Artificial Sequence:  Enzymatic Nucleic Acid Molecule
aaagucucugaugaggccguuaggccgaaaguagcc

SEQ ID NO: 2019 - RNA, 36 nt, Artificial Sequence
  Description of Artificial Sequence:  Enzymatic Nucleic Acid Molecule
cugccgacugaugaggccguuaggccgaaagucuua

SEQ ID NO: 2020 - RNA, 36 nt, Artificial Sequence
  Description of Artificial Sequence:  Enzymatic Nucleic Acid Molecule
gcugccgcugaugaggccguuaggccgaaaagucuu

SEQ ID NO: 2021 - RNA, 36 nt, Artificial Sequence
  Description of Artificial Sequence:  Enzymatic Nucleic Acid Molecule
agcugcccugaugaggccguuaggccgaaaaagucu

SEQ ID NO: 2022 - RNA, 36 nt, Artificial Sequence
  Description of Artificial Sequence:  Enzymatic Nucleic Acid Molecule
ggccgaccugaugaggccguuaggccgaaauccgga

SEQ ID NO: 2023 - RNA, 36 nt, Artificial Sequence
  Description of Artificial Sequence:  Enzymatic Nucleic Acid Molecule
aacggcccugaugaggccguuaggccgaaacgaucc

SEQ ID NO: 2024 - RNA, 36 nt, Artificial Sequence
  Description of Artificial Sequence:  Enzymatic Nucleic Acid Molecule
cgcuguccugaugaggccguuaggccgaaacggccg

SEQ ID NO: 2025 - RNA, 36 nt, Artificial Sequence
  Description of Artificial Sequence:  Enzymatic Nucleic Acid Molecule
cauggagcugaugaggccguuaggccgaaaguacga

SEQ ID NO: 2026 - RNA, 36 nt, Artificial Sequence
  Description of Artificial Sequence:  Enzymatic Nucleic Acid Molecule
gggcaugcugaugaggccguuaggccgaaaggagua

SEQ ID NO: 2027 - RNA, 36 nt, Artificial Sequence
  Description of Artificial Sequence:  Enzymatic Nucleic Acid Molecule
cccccuccugaugaggccguuaggccgaaagggggg

SEQ ID NO: 2028 - RNA, 36 nt, Artificial Sequence
  Description of Artificial Sequence:  Enzymatic Nucleic Acid Molecule
ucgcugacugaugaggccguuaggccgaaaucaggg

SEQ ID NO: 2029 - RNA, 36 nt, Artificial Sequence
  Description of Artificial Sequence:  Enzymatic Nucleic Acid Molecule
cgucgcucugaugaggccguuaggccgaaagaucag

SEQ ID NO: 2030 - RNA, 36 nt, Artificial Sequence
  Description of Artificial Sequence:  Enzymatic Nucleic Acid Molecule
agaccaacugaugaggccguuaggccgaaacccguc

SEQ ID NO: 2031 - RNA, 36 nt, Artificial Sequence
  Description of Artificial Sequence:  Enzymatic Nucleic Acid Molecule
guagacccugaugaggccguuaggccgaaagacccg

SEQ ID NO: 2032 - RNA, 36 nt, Artificial Sequence
  Description of Artificial Sequence:  Enzymatic Nucleic Acid Molecule
cacgguacugaugaggccguuaggccgaaaccaaga

SEQ ID NO: 2033 - RNA, 36 nt, Artificial Sequence
  Description of Artificial Sequence:  Enzymatic Nucleic Acid Molecule
cucacggcugaugaggccguuaggccgaaagaccaa

SEQ ID NO: 2034 - RNA, 36 nt, Artificial Sequence
  Description of Artificial Sequence:  Enzymatic Nucleic Acid Molecule
agcagaccugaugaggccguuaggccgaaaugucgu

SEQ ID NO: 2035 - RNA, 36 nt, Artificial Sequence
  Description of Artificial Sequence:  Enzymatic Nucleic Acid Molecule
agcagcacugaugaggccguuaggccgaaacgaugu

SEQ ID NO: 2036 - RNA, 36 nt, Artificial Sequence
  Description of Artificial Sequence:  Enzymatic Nucleic Acid Molecule
ggacauucugaugaggccguuaggccgaaagcagca

SEQ ID NO: 2037 - RNA, 36 nt, Artificial Sequence
  Description of Artificial Sequence:  Enzymatic Nucleic Acid Molecule
uguguagcugaugaggccguuaggccgaaacauuga

SEQ ID NO: 2038 - RNA, 36 nt, Artificial Sequence
  Description of Artificial Sequence:  Enzymatic Nucleic Acid Molecule
acgcguucugaugaggccguuaggccgaaaugggca

SEQ ID NO: 2039 - RNA, 36 nt, Artificial Sequence
  Description of Artificial Sequence:  Enzymatic Nucleic Acid Molecule
acugcggcugaugaggccguuaggccgaaauguugu

SEQ ID NO: 2040 - RNA, 36 nt, Artificial Sequence
  Description of Artificial Sequence:  Enzymatic Nucleic Acid Molecule
cguccagcugaugaggccguuaggccgaaacuugca

SEQ ID NO: 2041 - RNA, 36 nt, Artificial Sequence
  Description of Artificial Sequence:  Enzymatic Nucleic Acid Molecule
gucccggcugaugaggccguuaggccgaaagugguc

SEQ ID NO: 2042 - RNA, 36 nt, Artificial Sequence
  Description of Artificial Sequence:  Enzymatic Nucleic Acid Molecule
agaaguucugaugaggccguuaggccgaaagccuua

SEQ ID NO: 2043 - RNA, 36 nt, Artificial Sequence
  Description of Artificial Sequence:  Enzymatic Nucleic Acid Molecule
cuacggacugaugaggccguuaggccgaaagaaguu

SEQ ID NO: 2044 - RNA, 36 nt, Artificial Sequence
  Description of Artificial Sequence:  Enzymatic Nucleic Acid Molecule
uucuacgcugaugaggccguuaggccgaaauagaag

SEQ ID NO: 2045 - RNA, 36 nt, Artificial Sequence
  Description of Artificial Sequence:  Enzymatic Nucleic Acid Molecule
cuucuuccugaugaggccguuaggccgaaacggaua

SEQ ID NO: 2046 - RNA, 36 nt, Artificial Sequence
  Description of Artificial Sequence:  Enzymatic Nucleic Acid Molecule
aaauuuacugaugaggccguuaggccgaaauuuggc

SEQ ID NO: 2047 - RNA, 36 nt, Artificial Sequence
  Description of Artificial Sequence:  Enzymatic Nucleic Acid Molecule
ccaaauucugaugaggccguuaggccgaaagauuug

SEQ ID NO: 2048 - RNA, 36 nt, Artificial Sequence
  Description of Artificial Sequence:  Enzymatic Nucleic Acid Molecule
auagccacugaugaggccguuaggccgaaauuuaga

SEQ ID NO: 2049 - RNA, 36 nt, Artificial Sequence
  Description of Artificial Sequence:  Enzymatic Nucleic Acid Molecule
cauagcccugaugaggccguuaggccgaaaauuuag

SEQ ID NO: 2050 - RNA, 36 nt, Artificial Sequence
  Description of Artificial Sequence:  Enzymatic Nucleic Acid Molecule
ugccccacugaugaggccguuaggccgaaagccaaa

SEQ ID NO: 2051 - RNA, 36 nt, Artificial Sequence
  Description of Artificial Sequence:  Enzymatic Nucleic Acid Molecule
cggagcgcugaugaggccguuaggccgaaauguggu

SEQ ID NO: 2052 - RNA, 36 nt, Artificial Sequence
  Description of Artificial Sequence:  Enzymatic Nucleic Acid Molecule
ccacacgcugaugaggccguuaggccgaaagcggau

SEQ ID NO: 2053 - RNA, 36 nt, Artificial Sequence
  Description of Artificial Sequence:  Enzymatic Nucleic Acid Molecule
auacgaucugaugaggccguuaggccgaaaggcgag

SEQ ID NO: 2054 - RNA, 36 nt, Artificial Sequence
  Description of Artificial Sequence:  Enzymatic Nucleic Acid Molecule
aauacgacugaugaggccguuaggccgaaaaggcga

SEQ ID NO: 2055 - RNA, 36 nt, Artificial Sequence
  Description of Artificial Sequence:  Enzymatic Nucleic Acid Molecule
ggaauaccugaugaggccguuaggccgaaauaaggc

SEQ ID NO: 2056 - RNA, 36 nt, Artificial Sequence
  Description of Artificial Sequence:  Enzymatic Nucleic Acid Molecule
gaauccgcugaugaggccguuaggccgaaacgagga

SEQ ID NO: 2057 - RNA, 36 nt, Artificial Sequence
  Description of Artificial Sequence:  Enzymatic Nucleic Acid Molecule
guacuggcugaugaggccguuaggccgaaauccgua

SEQ ID NO: 2058 - RNA, 36 nt, Artificial Sequence
  Description of Artificial Sequence:  Enzymatic Nucleic Acid Molecule
aggagagcugaugaggccguuaggccgaaacuggaa

SEQ ID NO: 2059 - RNA, 36 nt, Artificial Sequence
  Description of Artificial Sequence:  Enzymatic Nucleic Acid Molecule
ugcccagcugaugaggccguuaggccgaaagaguac

SEQ ID NO: 2060 - RNA, 36 nt, Artificial Sequence
  Description of Artificial Sequence:  Enzymatic Nucleic Acid Molecule
ggaacuccugaugaggccguuaggccgaaacccgcu

SEQ ID NO: 2061 - RNA, 36 nt, Artificial Sequence
  Description of Artificial Sequence:  Enzymatic Nucleic Acid Molecule
caccaggcugaugaggccguuaggccgaaacucaac

SEQ ID NO: 2062 - RNA, 36 nt, Artificial Sequence
  Description of Artificial Sequence:  Enzymatic Nucleic Acid Molecule
ucaccagcugaugaggccguuaggccgaaaacucaa

SEQ ID NO: 2063 - RNA, 36 nt, Artificial Sequence
  Description of Artificial Sequence:  Enzymatic Nucleic Acid Molecule
uuucuuucugaugaggccguuaggccgaaauuucca

SEQ ID NO: 2064 - RNA, 36 nt, Artificial Sequence
  Description of Artificial Sequence:  Enzymatic Nucleic Acid Molecule
gcgacuucugaugaggccguuaggccgaaauggccu

SEQ ID NO: 2065 - RNA, 36 nt, Artificial Sequence
  Description of Artificial Sequence:  Enzymatic Nucleic Acid Molecule
cgugagccugaugaggccguuaggccgaaacuuuau

SEQ ID NO: 2066 - RNA, 36 nt, Artificial Sequence
  Description of Artificial Sequence:  Enzymatic Nucleic Acid Molecule
gcuccgucugaugaggccguuaggccgaaagcgacu

SEQ ID NO: 2067 - RNA, 36 nt, Artificial Sequence
  Description of Artificial Sequence:  Enzymatic Nucleic Acid Molecule
cgauguacugaugaggccguuaggccgaaagccgcu

SEQ ID NO: 2068 - RNA, 36 nt, Artificial Sequence
  Description of Artificial Sequence:  Enzymatic Nucleic Acid Molecule
cccgaugcugaugaggccguuaggccgaaagagccg

SEQ ID NO: 2069 - RNA, 36 nt, Artificial Sequence
  Description of Artificial Sequence:  Enzymatic Nucleic Acid Molecule
ggccccccugaugaggccguuaggccgaaauguaga

SEQ ID NO: 2070 - RNA, 36 nt, Artificial Sequence
  Description of Artificial Sequence:  Enzymatic Nucleic Acid Molecule
cggcgaucugaugaggccguuaggccgaaaccgcag

SEQ ID NO: 2071 - RNA, 36 nt, Artificial Sequence
  Description of Artificial Sequence:  Enzymatic Nucleic Acid Molecule
ccggcgacugaugaggccguuaggccgaaaaccgca

SEQ ID NO: 2072 - RNA, 36 nt, Artificial Sequence
  Description of Artificial Sequence:  Enzymatic Nucleic Acid Molecule
caccggccugaugaggccguuaggccgaaauaaccg

SEQ ID NO: 2073 - RNA, 36 nt, Artificial Sequence
  Description of Artificial Sequence:  Enzymatic Nucleic Acid Molecule
ccgcagccugaugaggccguuaggccgaaagucguc

SEQ ID NO: 2074 - RNA, 36 nt, Artificial Sequence
  Description of Artificial Sequence:  Enzymatic Nucleic Acid Molecule
gcagcuccugaugaggccguuaggccgaaacaggcc

SEQ ID NO: 2075 - RNA, 36 nt, Artificial Sequence
  Description of Artificial Sequence:  Enzymatic Nucleic Acid Molecule
aguccugcugaugaggccguuaggccgaaagcuuug

SEQ ID NO: 2076 - RNA, 36 nt, Artificial Sequence
  Description of Artificial Sequence:  Enzymatic Nucleic Acid Molecule
cguucaccugaugaggccguuaggccgaaagcaucg

SEQ ID NO: 2077 - RNA, 36 nt, Artificial Sequence
  Description of Artificial Sequence:  Enzymatic Nucleic Acid Molecule
uaacgaccugaugaggccguuaggccgaaaggucgu

SEQ ID NO: 2078 - RNA, 36 nt, Artificial Sequence
  Description of Artificial Sequence:  Enzymatic Nucleic Acid Molecule
agauaaccugaugaggccguuaggccgaaacaaggu

SEQ ID NO: 2079 - RNA, 36 nt, Artificial Sequence
  Description of Artificial Sequence:  Enzymatic Nucleic Acid Molecule
cacagaucugaugaggccguuaggccgaaacgacaa

SEQ ID NO: 2080 - RNA, 36 nt, Artificial Sequence
  Description of Artificial Sequence:  Enzymatic Nucleic Acid Molecule
gggggcacugaugaggccguuaggccgaaaguaccu

SEQ ID NO: 2081 - RNA, 36 nt, Artificial Sequence
  Description of Artificial Sequence:  Enzymatic Nucleic Acid Molecule
caagucgcugaugaggccguuaggccgaaauucugg

SEQ ID NO: 2082 - RNA, 36 nt, Artificial Sequence
  Description of Artificial Sequence:  Enzymatic Nucleic Acid Molecule
guuggagcugaugaggccguuaggccgaaagcauga

SEQ ID NO: 2083 - RNA, 36 nt, Artificial Sequence
  Description of Artificial Sequence:  Enzymatic Nucleic Acid Molecule
cacguugcugaugaggccguuaggccgaaaggagca

SEQ ID NO: 2084 - RNA, 36 nt, Artificial Sequence
  Description of Artificial Sequence:  Enzymatic Nucleic Acid Molecule
uuugccgcugaugaggccguuaggccgaaaugcguc

SEQ ID NO: 2085 - RNA, 36 nt, Artificial Sequence
  Description of Artificial Sequence:  Enzymatic Nucleic Acid Molecule
cccgugccugaugaggccguuaggccgaaagggggg

SEQ ID NO: 2086 - RNA, 36 nt, Artificial Sequence
  Description of Artificial Sequence:  Enzymatic Nucleic Acid Molecule
gggcgcacugaugaggccguuaggccgaaacaugau

SEQ ID NO: 2087 - RNA, 36 nt, Artificial Sequence
  Description of Artificial Sequence:  Enzymatic Nucleic Acid Molecule
ugcccaucugaugaggccguuaggccgaaagguggg

SEQ ID NO: 2088 - RNA, 36 nt, Artificial Sequence
  Description of Artificial Sequence:  Enzymatic Nucleic Acid Molecule
uugcccacugaugaggccguuaggccgaaaaggugg

SEQ ID NO: 2089 - RNA, 36 nt, Artificial Sequence
  Description of Artificial Sequence:  Enzymatic Nucleic Acid Molecule
gucaucacugaugaggccguuaggccgaaaaucauc

SEQ ID NO: 2090 - RNA, 36 nt, Artificial Sequence
  Description of Artificial Sequence:  Enzymatic Nucleic Acid Molecule
aagaagucugaugaggccguuaggccgaaagucauc

SEQ ID NO: 2091 - RNA, 36 nt, Artificial Sequence
  Description of Artificial Sequence:  Enzymatic Nucleic Acid Molecule
aucugaccugaugaggccguuaggccgaaauccagg

SEQ ID NO: 2092 - RNA, 36 nt, Artificial Sequence
  Description of Artificial Sequence:  Enzymatic Nucleic Acid Molecule
uagaucucugaugaggccguuaggccgaaacaaucc

SEQ ID NO: 2093 - RNA, 36 nt, Artificial Sequence
  Description of Artificial Sequence:  Enzymatic Nucleic Acid Molecule
ccccguacugaugaggccguuaggccgaaaucugac

SEQ ID NO: 2094 - RNA, 36 nt, Artificial Sequence
  Description of Artificial Sequence:  Enzymatic Nucleic Acid Molecule
ggccccgcugaugaggccguuaggccgaaagaucug

SEQ ID NO: 2095 - RNA, 36 nt, Artificial Sequence
  Description of Artificial Sequence:  Enzymatic Nucleic Acid Molecule
guuuccucugaugaggccguuaggccgaaaggcaug

SEQ ID NO: 2096 - RNA, 36 nt, Artificial Sequence
  Description of Artificial Sequence:  Enzymatic Nucleic Acid Molecule
guacccccugaugaggccguuaggccgaaaguuucc

SEQ ID NO: 2097 - RNA, 36 nt, Artificial Sequence
  Description of Artificial Sequence:  Enzymatic Nucleic Acid Molecule
agggcggcugaugaggccguuaggccgaaaccccaa

SEQ ID NO: 2098 - RNA, 36 nt, Artificial Sequence
  Description of Artificial Sequence:  Enzymatic Nucleic Acid Molecule
gacucgccugaugaggccguuaggccgaaagggcgg

SEQ ID NO: 2099 - RNA, 36 nt, Artificial Sequence
  Description of Artificial Sequence:  Enzymatic Nucleic Acid Molecule
gucuccacugaugaggccguuaggccgaaacucgca

SEQ ID NO: 2100 - RNA, 36 nt, Artificial Sequence
  Description of Artificial Sequence:  Enzymatic Nucleic Acid Molecule
uagcgcgcugaugaggccguuaggccgaaacacuuc

SEQ ID NO: 2101 - RNA, 36 nt, Artificial Sequence
  Description of Artificial Sequence:  Enzymatic Nucleic Acid Molecule
aguagcccugaugaggccguuaggccgaaagcgcgg

SEQ ID NO: 2102 - RNA, 36 nt, Artificial Sequence
  Description of Artificial Sequence:  Enzymatic Nucleic Acid Molecule
gggacagcugaugaggccguuaggccgaaagccuag

SEQ ID NO: 2103 - RNA, 36 nt, Artificial Sequence
  Description of Artificial Sequence:  Enzymatic Nucleic Acid Molecule
cccuuggcugaugaggccguuaggccgaaacaguag

SEQ ID NO: 2104 - RNA, 36 nt, Artificial Sequence
  Description of Artificial Sequence:  Enzymatic Nucleic Acid Molecule
cagcuggcugaugaggccguuaggccgaaacgcggc

SEQ ID NO: 2105 - RNA, 36 nt, Artificial Sequence
  Description of Artificial Sequence:  Enzymatic Nucleic Acid Molecule
gcuggaccugaugaggccguuaggccgaaaguccag

SEQ ID NO: 2106 - RNA, 36 nt, Artificial Sequence
  Description of Artificial Sequence:  Enzymatic Nucleic Acid Molecule
ccagcugcugaugaggccguuaggccgaaacaaguc

SEQ ID NO: 2107 - RNA, 36 nt, Artificial Sequence
  Description of Artificial Sequence:  Enzymatic Nucleic Acid Molecule
agcaacgcugaugaggccguuaggccgaaaccagcu

SEQ ID NO: 2108 - RNA, 36 nt, Artificial Sequence
  Description of Artificial Sequence:  Enzymatic Nucleic Acid Molecule
cagcaaccugaugaggccguuaggccgaaaaccagc

SEQ ID NO: 2109 - RNA, 36 nt, Artificial Sequence
  Description of Artificial Sequence:  Enzymatic Nucleic Acid Molecule
aaccagccugaugaggccguuaggccgaaacgaacc

SEQ ID NO: 2110 - RNA, 36 nt, Artificial Sequence
  Description of Artificial Sequence:  Enzymatic Nucleic Acid Molecule
ugugauacugaugaggccguuaggccgaaaugucuc

SEQ ID NO: 2111 - RNA, 36 nt, Artificial Sequence
  Description of Artificial Sequence:  Enzymatic Nucleic Acid Molecule
gcugugacugaugaggccguuaggccgaaauauguc

SEQ ID NO: 2112 - RNA, 36 nt, Artificial Sequence
  Description of Artificial Sequence:  Enzymatic Nucleic Acid Molecule
aggcugucugaugaggccguuaggccgaaauauaug

SEQ ID NO: 2113 - RNA, 36 nt, Artificial Sequence
  Description of Artificial Sequence:  Enzymatic Nucleic Acid Molecule
ggcacgacugaugaggccguuaggccgaaacaggcu

SEQ ID NO: 2114 - RNA, 36 nt, Artificial Sequence
  Description of Artificial Sequence:  Enzymatic Nucleic Acid Molecule
guaggagcugaugaggccguuaggccgaaaggcacc

SEQ ID NO: 2115 - RNA, 36 nt, Artificial Sequence
  Description of Artificial Sequence:  Enzymatic Nucleic Acid Molecule
aaaguagcugaugaggccguuaggccgaaaguaggc

SEQ ID NO: 2116 - RNA, 36 nt, Artificial Sequence
  Description of Artificial Sequence:  Enzymatic Nucleic Acid Molecule
cggaaagcugaugaggccguuaggccgaaaggagua

SEQ ID NO: 2117 - RNA, 36 nt, Artificial Sequence
  Description of Artificial Sequence:  Enzymatic Nucleic Acid Molecule
cuacggacugaugaggccguuaggccgaaaguagga

SEQ ID NO: 2118 - RNA, 36 nt, Artificial Sequence
  Description of Artificial Sequence:  Enzymatic Nucleic Acid Molecule
ccuacggcugaugaggccguuaggccgaaaaguagg

SEQ ID NO: 2119 - RNA, 36 nt, Artificial Sequence
  Description of Artificial Sequence:  Enzymatic Nucleic Acid Molecule
cccuacgcugaugaggccguuaggccgaaaaaguag

SEQ ID NO: 2120 - RNA, 36 nt, Artificial Sequence
  Description of Artificial Sequence:  Enzymatic Nucleic Acid Molecule
cuacccccugaugaggccguuaggccgaaacggaaa

SEQ ID NO: 2121 - RNA, 36 nt, Artificial Sequence
  Description of Artificial Sequence:  Enzymatic Nucleic Acid Molecule
agaugcccugaugaggccguuaggccgaaaccccua

SEQ ID NO: 2122 - RNA, 36 nt, Artificial Sequence
  Description of Artificial Sequence:  Enzymatic Nucleic Acid Molecule
gcagguacugaugaggccguuaggccgaaaugccua

SEQ ID NO: 2123 - RNA, 36 nt, Artificial Sequence
  Description of Artificial Sequence:  Enzymatic Nucleic Acid Molecule
gagcaggcugaugaggccguuaggccgaaagaugcc

SEQ ID NO: 2124 - RNA, 36 nt, Artificial Sequence
  Description of Artificial Sequence:  Enzymatic Nucleic Acid Molecule
gguugggcugaugaggccguuaggccgaaagcaggu

SEQ ID NO: 2125 - RNA, 36 nt, Artificial Sequence
  Description of Artificial Sequence:  Enzymatic Nucleic Acid Molecule
gagugaucugaugaggccguuaggccgaaagcuccc

SEQ ID NO: 2126 - RNA, 36 nt, Artificial Sequence
  Description of Artificial Sequence:  Enzymatic Nucleic Acid Molecule
cuggagucugaugaggccguuaggccgaaauuagcu

SEQ ID NO: 2127 - RNA, 36 nt, Artificial Sequence
  Description of Artificial Sequence:  Enzymatic Nucleic Acid Molecule
uggccugcugaugaggccguuaggccgaaagugauu

SEQ ID NO: 2128 - RNA, 36 nt, Artificial Sequence
  Description of Artificial Sequence:  Enzymatic Nucleic Acid Molecule
gauggcccugaugaggccguuaggccgaaauuggcc

SEQ ID NO: 2129 - RNA, 36 nt, Artificial Sequence
  Description of Artificial Sequence:  Enzymatic Nucleic Acid Molecule
cgccccccugaugaggccguuaggccgaaaucgggg

SEQ ID NO: 2130 - RNA, 36 nt, Artificial Sequence
  Description of Artificial Sequence:  Enzymatic Nucleic Acid Molecule
agugauccugaugaggccguuaggccgaaauggugg

SEQ ID NO: 2131 - RNA, 36 nt, Artificial Sequence
  Description of Artificial Sequence:  Enzymatic Nucleic Acid Molecule
ggggagucugaugaggccguuaggccgaaaucuaug

SEQ ID NO: 2132 - RNA, 36 nt, Artificial Sequence
  Description of Artificial Sequence:  Enzymatic Nucleic Acid Molecule
cacagggcugaugaggccguuaggccgaaagugauc

SEQ ID NO: 2133 - RNA, 36 nt, Artificial Sequence
  Description of Artificial Sequence:  Enzymatic Nucleic Acid Molecule
aagacagcugaugaggccguuaggccgaaaguuccu

SEQ ID NO: 2134 - RNA, 36 nt, Artificial Sequence
  Description of Artificial Sequence:  Enzymatic Nucleic Acid Molecule
cugcgugcugaugaggccguuaggccgaaagacagu

SEQ ID NO: 2135 - RNA, 36 nt, Artificial Sequence
  Description of Artificial Sequence:  Enzymatic Nucleic Acid Molecule
ucugcgucugaugaggccguuaggccgaaaagacag

SEQ ID NO: 2136 - RNA, 36 nt, Artificial Sequence
  Description of Artificial Sequence:  Enzymatic Nucleic Acid Molecule
ucauacucugaugaggccguuaggccgaaacgccau

SEQ ID NO: 2137 - RNA, 36 nt, Artificial Sequence
  Description of Artificial Sequence:  Enzymatic Nucleic Acid Molecule
cucauaccugaugaggccguuaggccgaaaacgcca

SEQ ID NO: 2138 - RNA, 36 nt, Artificial Sequence
  Description of Artificial Sequence:  Enzymatic Nucleic Acid Molecule
acacucacugaugaggccguuaggccgaaacuaacg

SEQ ID NO: 2139 - RNA, 36 nt, Artificial Sequence
  Description of Artificial Sequence:  Enzymatic Nucleic Acid Molecule
gauccaacugaugaggccguuaggccgaaaaaggac

SEQ ID NO: 2140 - RNA, 36 nt, Artificial Sequence
  Description of Artificial Sequence:  Enzymatic Nucleic Acid Molecule
gcggguucugaugaggccguuaggccgaaauccaag

SEQ ID NO: 2141 - RNA, 36 nt, Artificial Sequence
  Description of Artificial Sequence:  Enzymatic Nucleic Acid Molecule
acgcccacugaugaggccguuaggccgaaaucucca

SEQ ID NO: 2142 - RNA, 36 nt, Artificial Sequence
  Description of Artificial Sequence:  Enzymatic Nucleic Acid Molecule
cacgccccugaugaggccguuaggccgaaaaucucc

SEQ ID NO: 2143 - RNA, 36 nt, Artificial Sequence
  Description of Artificial Sequence:  Enzymatic Nucleic Acid Molecule
gguuuagcugaugaggccguuaggccgaaauucgug

SEQ ID NO: 2144 - RNA, 36 nt, Artificial Sequence
  Description of Artificial Sequence:  Enzymatic Nucleic Acid Molecule
ugagguucugaugaggccguuaggccgaaaggauuc

SEQ ID NO: 2145 - RNA, 36 nt, Artificial Sequence
  Description of Artificial Sequence:  Enzymatic Nucleic Acid Molecule
uaggugucugaugaggccguuaggccgaaacguuug

SEQ ID NO: 2146 - RNA, 36 nt, Artificial Sequence
  Description of Artificial Sequence:  Enzymatic Nucleic Acid Molecule
gcggcggcugaugaggccguuaggccgaaagguguu

SEQ ID NO: 2147 - RNA, 36 nt, Artificial Sequence
  Description of Artificial Sequence:  Enzymatic Nucleic Acid Molecule
caccaaccugaugaggccguuaggccgaaaucugac

SEQ ID NO: 2148 - RNA, 36 nt, Artificial Sequence
  Description of Artificial Sequence:  Enzymatic Nucleic Acid Molecule
cuccacccugaugaggccguuaggccgaaacgaucu

SEQ ID NO: 2149 - RNA, 36 nt, Artificial Sequence
  Description of Artificial Sequence:  Enzymatic Nucleic Acid Molecule
acacguacugaugaggccguuaggccgaaacuccac

SEQ ID NO: 2150 - RNA, 36 nt, Artificial Sequence
  Description of Artificial Sequence:  Enzymatic Nucleic Acid Molecule
aacacgucugaugaggccguuaggccgaaaacucca

SEQ ID NO: 2151 - RNA, 36 nt, Artificial Sequence
  Description of Artificial Sequence:  Enzymatic Nucleic Acid Molecule
caacacgcugaugaggccguuaggccgaaaaacucc

SEQ ID NO: 2152 - RNA, 36 nt, Artificial Sequence
  Description of Artificial Sequence:  Enzymatic Nucleic Acid Molecule
gcgcggccugaugaggccguuaggccgaaacacgua

SEQ ID NO: 2153 - RNA, 36 nt, Artificial Sequence
  Description of Artificial Sequence:  Enzymatic Nucleic Acid Molecule
cuuccaccugaugaggccguuaggccgaaagguugc

SEQ ID NO: 2154 - RNA, 36 nt, Artificial Sequence
  Description of Artificial Sequence:  Enzymatic Nucleic Acid Molecule
auugcgccugaugaggccguuaggccgaaaccuccg

SEQ ID NO: 2155 - RNA, 36 nt, Artificial Sequence
  Description of Artificial Sequence:  Enzymatic Nucleic Acid Molecule
augaccucugaugaggccguuaggccgaaacccaga

SEQ ID NO: 2156 - RNA, 36 nt, Artificial Sequence
  Description of Artificial Sequence:  Enzymatic Nucleic Acid Molecule
cgcacgucugaugaggccguuaggccgaaaggguau

SEQ ID NO: 2157 - RNA, 36 nt, Artificial Sequence
  Description of Artificial Sequence:  Enzymatic Nucleic Acid Molecule
accccaucugaugaggccguuaggccgaaaggucgg

SEQ ID NO: 2158 - RNA, 36 nt, Artificial Sequence
  Description of Artificial Sequence:  Enzymatic Nucleic Acid Molecule
auagagacugaugaggccguuaggccgaaagagcaa

SEQ ID NO: 2159 - RNA, 36 nt, Artificial Sequence
  Description of Artificial Sequence:  Enzymatic Nucleic Acid Molecule
gauagagcugaugaggccguuaggccgaaaagagca

SEQ ID NO: 2160 - RNA, 36 nt, Artificial Sequence
  Description of Artificial Sequence:  Enzymatic Nucleic Acid Molecule
agauagacugaugaggccguuaggccgaaaaagagc

SEQ ID NO: 2161 - RNA, 36 nt, Artificial Sequence
  Description of Artificial Sequence:  Enzymatic Nucleic Acid Molecule
gaagauacugaugaggccguuaggccgaaagaaaga

SEQ ID NO: 2162 - RNA, 36 nt, Artificial Sequence
  Description of Artificial Sequence:  Enzymatic Nucleic Acid Molecule
aggaagacugaugaggccguuaggccgaaagagaaa

SEQ ID NO: 2163 - RNA, 36 nt, Artificial Sequence
  Description of Artificial Sequence:  Enzymatic Nucleic Acid Molecule
agaggaacugaugaggccguuaggccgaaauagaga

SEQ ID NO: 2164 - RNA, 36 nt, Artificial Sequence
  Description of Artificial Sequence:  Enzymatic Nucleic Acid Molecule
caagaggcugaugaggccguuaggccgaaagauaga

SEQ ID NO: 2165 - RNA, 36 nt, Artificial Sequence
  Description of Artificial Sequence:  Enzymatic Nucleic Acid Molecule
ccaagagcugaugaggccguuaggccgaaaagauag

SEQ ID NO: 2166 - RNA, 36 nt, Artificial Sequence
  Description of Artificial Sequence:  Enzymatic Nucleic Acid Molecule
gggccaacugaugaggccguuaggccgaaaggaaga

SEQ ID NO: 2167 - RNA, 36 nt, Artificial Sequence
  Description of Artificial Sequence:  Enzymatic Nucleic Acid Molecule
cagggcccugaugaggccguuaggccgaaagaggaa

SEQ ID NO: 2168 - RNA, 36 nt, Artificial Sequence
  Description of Artificial Sequence:  Enzymatic Nucleic Acid Molecule
caaacagcugaugaggccguuaggccgaaacagcag

SEQ ID NO: 2169 - RNA, 36 nt, Artificial Sequence
  Description of Artificial Sequence:  Enzymatic Nucleic Acid Molecule
auggucacugaugaggccguuaggccgaaacaggac

SEQ ID NO: 2170 - RNA, 36 nt, Artificial Sequence
  Description of Artificial Sequence:  Enzymatic Nucleic Acid Molecule
gaugguccugaugaggccguuaggccgaaaacagga

SEQ ID NO: 2171 - RNA, 36 nt, Artificial Sequence
  Description of Artificial Sequence:  Enzymatic Nucleic Acid Molecule
aagcuggcugaugaggccguuaggccgaaaugguca

SEQ ID NO: 2172 - RNA, 36 nt, Artificial Sequence
  Description of Artificial Sequence:  Enzymatic Nucleic Acid Molecule
uaagcggcugaugaggccguuaggccgaaagcuggg

SEQ ID NO: 2173 - RNA, 36 nt, Artificial Sequence
  Description of Artificial Sequence:  Enzymatic Nucleic Acid Molecule
auaagcgcugaugaggccguuaggccgaaaagcugg

SEQ ID NO: 2174 - RNA, 36 nt, Artificial Sequence
  Description of Artificial Sequence:  Enzymatic Nucleic Acid Molecule
accugaucugaugaggccguuaggccgaaagcggaa

SEQ ID NO: 2175 - RNA, 36 nt, Artificial Sequence
  Description of Artificial Sequence:  Enzymatic Nucleic Acid Molecule
caccugacugaugaggccguuaggccgaaaagcgga

SEQ ID NO: 2176 - RNA, 36 nt, Artificial Sequence
  Description of Artificial Sequence:  Enzymatic Nucleic Acid Molecule
cgcaccucugaugaggccguuaggccgaaauaagcg

SEQ ID NO: 2177 - RNA, 36 nt, Artificial Sequence
  Description of Artificial Sequence:  Enzymatic Nucleic Acid Molecule
cagcccgcugaugaggccguuaggccgaaaugcguu

SEQ ID NO: 2178 - RNA, 36 nt, Artificial Sequence
  Description of Artificial Sequence:  Enzymatic Nucleic Acid Molecule
gacauggcugaugaggccguuaggccgaaacagccc

SEQ ID NO: 2179 - RNA, 36 nt, Artificial Sequence
  Description of Artificial Sequence:  Enzymatic Nucleic Acid Molecule
cauucgucugaugaggccguuaggccgaaacauggu

SEQ ID NO: 2180 - RNA, 36 nt, Artificial Sequence
  Description of Artificial Sequence:  Enzymatic Nucleic Acid Molecule
ugaguugcugaugaggccguuaggccgaaagcaguc

SEQ ID NO: 2181 - RNA, 36 nt, Artificial Sequence
  Description of Artificial Sequence:  Enzymatic Nucleic Acid Molecule
aaugcuucugaugaggccguuaggccgaaaguugga

SEQ ID NO: 2182 - RNA, 36 nt, Artificial Sequence
  Description of Artificial Sequence:  Enzymatic Nucleic Acid Molecule
cauacaccugaugaggccguuaggccgaaaugcuug

SEQ ID NO: 2183 - RNA, 36 nt, Artificial Sequence
  Description of Artificial Sequence:  Enzymatic Nucleic Acid Molecule
ccgggggcugaugaggccguuaggccgaaaugcaug

SEQ ID NO: 2184 - RNA, 36 nt, Artificial Sequence
  Description of Artificial Sequence:  Enzymatic Nucleic Acid Molecule
ugggagucugaugaggccguuaggccgaaagcgcua

SEQ ID NO: 2185 - RNA, 36 nt, Artificial Sequence
  Description of Artificial Sequence:  Enzymatic Nucleic Acid Molecule
agcguggcugaugaggccguuaggccgaaagugagc

SEQ ID NO: 2186 - RNA, 36 nt, Artificial Sequence
  Description of Artificial Sequence:  Enzymatic Nucleic Acid Molecule
uggccgccugaugaggccguuaggccgaaagcgugg

SEQ ID NO: 2187 - RNA, 36 nt, Artificial Sequence
  Description of Artificial Sequence:  Enzymatic Nucleic Acid Molecule
uagugggcugaugaggccguuaggccgaaaugcugg

SEQ ID NO: 2188 - RNA, 36 nt, Artificial Sequence
  Description of Artificial Sequence:  Enzymatic Nucleic Acid Molecule
auugucgcugaugaggccguuaggccgaaagugggg

SEQ ID NO: 2189 - RNA, 36 nt, Artificial Sequence
  Description of Artificial Sequence:  Enzymatic Nucleic Acid Molecule
ggcgucgcugaugaggccguuaggccgaaauugucg

SEQ ID NO: 2190 - RNA, 36 nt, Artificial Sequence
  Description of Artificial Sequence:  Enzymatic Nucleic Acid Molecule
gaacagacugaugaggccguuaggccgaaagcggcc

SEQ ID NO: 2191 - RNA, 36 nt, Artificial Sequence
  Description of Artificial Sequence:  Enzymatic Nucleic Acid Molecule
auccgcacugaugaggccguuaggccgaaagguccc

SEQ ID NO: 2192 - RNA, 36 nt, Artificial Sequence
  Description of Artificial Sequence:  Enzymatic Nucleic Acid Molecule
gggagaccugaugaggccguuaggccgaaaggaaaa

SEQ ID NO: 2193 - RNA, 36 nt, Artificial Sequence
  Description of Artificial Sequence:  Enzymatic Nucleic Acid Molecule
acugggacugaugaggccguuaggccgaaacgagga

SEQ ID NO: 2194 - RNA, 36 nt, Artificial Sequence
  Description of Artificial Sequence:  Enzymatic Nucleic Acid Molecule
caacuggcugaugaggccguuaggccgaaagacgag

SEQ ID NO: 2195 - RNA, 36 nt, Artificial Sequence
  Description of Artificial Sequence:  Enzymatic Nucleic Acid Molecule
ggugaaccugaugaggccguuaggccgaaacuggga

SEQ ID NO: 2196 - RNA, 36 nt, Artificial Sequence
  Description of Artificial Sequence:  Enzymatic Nucleic Acid Molecule
gaaggugcugaugaggccguuaggccgaaacaacug

SEQ ID NO: 2197 - RNA, 36 nt, Artificial Sequence
  Description of Artificial Sequence:  Enzymatic Nucleic Acid Molecule
agaaggucugaugaggccguuaggccgaaaacaacu

SEQ ID NO: 2198 - RNA, 36 nt, Artificial Sequence
  Description of Artificial Sequence:  Enzymatic Nucleic Acid Molecule
aggcgagcugaugaggccguuaggccgaaaggugaa

SEQ ID NO: 2199 - RNA, 36 nt, Artificial Sequence
  Description of Artificial Sequence:  Enzymatic Nucleic Acid Molecule
gaggcgacugaugaggccguuaggccgaaaagguga

SEQ ID NO: 2200 - RNA, 36 nt, Artificial Sequence
  Description of Artificial Sequence:  Enzymatic Nucleic Acid Molecule
gcgaggccugaugaggccguuaggccgaaagaaggu

SEQ ID NO: 2201 - RNA, 36 nt, Artificial Sequence
  Description of Artificial Sequence:  Enzymatic Nucleic Acid Molecule
uaccggccugaugaggccguuaggccgaaaggcgag

SEQ ID NO: 2202 - RNA, 36 nt, Artificial Sequence
  Description of Artificial Sequence:  Enzymatic Nucleic Acid Molecule
ugucucacugaugaggccguuaggccgaaaccggcg

SEQ ID NO: 2203 - RNA, 36 nt, Artificial Sequence
  Description of Artificial Sequence:  Enzymatic Nucleic Acid Molecule
aguccugcugaugaggccguuaggccgaaacugucu

SEQ ID NO: 2204 - RNA, 36 nt, Artificial Sequence
  Description of Artificial Sequence:  Enzymatic Nucleic Acid Molecule
auugagccugaugaggccguuaggccgaaauugcag

SEQ ID NO: 2205 - RNA, 36 nt, Artificial Sequence
  Description of Artificial Sequence:  Enzymatic Nucleic Acid Molecule
auagauucugaugaggccguuaggccgaaagcaauu

SEQ ID NO: 2206 - RNA, 36 nt, Artificial Sequence
  Description of Artificial Sequence:  Enzymatic Nucleic Acid Molecule
cgggauacugaugaggccguuaggccgaaauugagc

SEQ ID NO: 2207 - RNA, 36 nt, Artificial Sequence
  Description of Artificial Sequence:  Enzymatic Nucleic Acid Molecule
gccgggacugaugaggccguuaggccgaaagauuga

SEQ ID NO: 2208 - RNA, 36 nt, Artificial Sequence
  Description of Artificial Sequence:  Enzymatic Nucleic Acid Molecule
uggccggcugaugaggccguuaggccgaaauagauu

SEQ ID NO: 2209 - RNA, 36 nt, Artificial Sequence
  Description of Artificial Sequence:  Enzymatic Nucleic Acid Molecule
auauccccugaugaggccguuaggccgaaagccaug

SEQ ID NO: 2210 - RNA, 36 nt, Artificial Sequence
  Description of Artificial Sequence:  Enzymatic Nucleic Acid Molecule
aucaucacugaugaggccguuaggccgaaaucccaa

SEQ ID NO: 2211 - RNA, 36 nt, Artificial Sequence
  Description of Artificial Sequence:  Enzymatic Nucleic Acid Molecule
uguaggccugaugaggccguuaggccgaaaccaguu

SEQ ID NO: 2212 - RNA, 36 nt, Artificial Sequence
  Description of Artificial Sequence:  Enzymatic Nucleic Acid Molecule
gcuguugcugaugaggccguuaggccgaaaggcgac

SEQ ID NO: 2213 - RNA, 36 nt, Artificial Sequence
  Description of Artificial Sequence:  Enzymatic Nucleic Acid Molecule
acaccaccugaugaggccguuaggccgaaagggcug

SEQ ID NO: 2214 - RNA, 36 nt, Artificial Sequence
  Description of Artificial Sequence:  Enzymatic Nucleic Acid Molecule
uaacugccugaugaggccguuaggccgaaacaccac

SEQ ID NO: 2215 - RNA, 36 nt, Artificial Sequence
  Description of Artificial Sequence:  Enzymatic Nucleic Acid Molecule
ccggagucugaugaggccguuaggccgaaacugcga

SEQ ID NO: 2216 - RNA, 36 nt, Artificial Sequence
  Description of Artificial Sequence:  Enzymatic Nucleic Acid Molecule
uccggagcugaugaggccguuaggccgaaaacugcg

SEQ ID NO: 2217 - RNA, 36 nt, Artificial Sequence
  Description of Artificial Sequence:  Enzymatic Nucleic Acid Molecule
ggauccgcugaugaggccguuaggccgaaaguaacu

SEQ ID NO: 2218 - RNA, 36 nt, Artificial Sequence
  Description of Artificial Sequence:  Enzymatic Nucleic Acid Molecule
cuuguggcugaugaggccguuaggccgaaauccgga

SEQ ID NO: 2219 - RNA, 36 nt, Artificial Sequence
  Description of Artificial Sequence:  Enzymatic Nucleic Acid Molecule
aagaccucugaugaggccguuaggccgaaagcccag

SEQ ID NO: 2220 - RNA, 36 nt, Artificial Sequence
  Description of Artificial Sequence:  Enzymatic Nucleic Acid Molecule
caaucaacugaugaggccguuaggccgaaaccuuag

SEQ ID NO: 2221 - RNA, 36 nt, Artificial Sequence
  Description of Artificial Sequence:  Enzymatic Nucleic Acid Molecule
cacaauccugaugaggccguuaggccgaaagaccuu

SEQ ID NO: 2222 - RNA, 36 nt, Artificial Sequence
  Description of Artificial Sequence:  Enzymatic Nucleic Acid Molecule
acaucaccugaugaggccguuaggccgaaaucaaga

SEQ ID NO: 2223 - RNA, 36 nt, Artificial Sequence
  Description of Artificial Sequence:  Enzymatic Nucleic Acid Molecule
aaagagucugaugaggccguuaggccgaaacaucac

SEQ ID NO: 2224 - RNA, 36 nt, Artificial Sequence
  Description of Artificial Sequence:  Enzymatic Nucleic Acid Molecule
caaagagcugaugaggccguuaggccgaaaacauca

SEQ ID NO: 2225 - RNA, 36 nt, Artificial Sequence
  Description of Artificial Sequence:  Enzymatic Nucleic Acid Molecule
cggcaaacugaugaggccguuaggccgaaaguaaca

SEQ ID NO: 2226 - RNA, 36 nt, Artificial Sequence
  Description of Artificial Sequence:  Enzymatic Nucleic Acid Molecule
gccggcacugaugaggccguuaggccgaaagaguaa

SEQ ID NO: 2227 - RNA, 36 nt, Artificial Sequence
  Description of Artificial Sequence:  Enzymatic Nucleic Acid Molecule
cgccggccugaugaggccguuaggccgaaaagagua

SEQ ID NO: 2228 - RNA, 36 nt, Artificial Sequence
  Description of Artificial Sequence:  Enzymatic Nucleic Acid Molecule
ccccguccugaugaggccguuaggccgaaacgccgg

SEQ ID NO: 2229 - RNA, 36 nt, Artificial Sequence
  Description of Artificial Sequence:  Enzymatic Nucleic Acid Molecule
uguaagucugaugaggccguuaggccgaaaccccgu

SEQ ID NO: 2230 - RNA, 36 nt, Artificial Sequence
  Description of Artificial Sequence:  Enzymatic Nucleic Acid Molecule
gucgugucugaugaggccguuaggccgaaagugacc

SEQ ID NO: 2231 - RNA, 36 nt, Artificial Sequence
  Description of Artificial Sequence:  Enzymatic Nucleic Acid Molecule
ugucgugcugaugaggccguuaggccgaaaagugac

SEQ ID NO: 2232 - RNA, 36 nt, Artificial Sequence
  Description of Artificial Sequence:  Enzymatic Nucleic Acid Molecule
agcuugccugaugaggccguuaggccgaaacccccc

SEQ ID NO: 2233 - RNA, 36 nt, Artificial Sequence
  Description of Artificial Sequence:  Enzymatic Nucleic Acid Molecule
guguggccugaugaggccguuaggccgaaagcuugc

SEQ ID NO: 2234 - RNA, 36 nt, Artificial Sequence
  Description of Artificial Sequence:  Enzymatic Nucleic Acid Molecule
aggacgucugaugaggccguuaggccgaaacgcucu

SEQ ID NO: 2235 - RNA, 36 nt, Artificial Sequence
  Description of Artificial Sequence:  Enzymatic Nucleic Acid Molecule
gaagaagcugaugaggccguuaggccgaaacgugac

SEQ ID NO: 2236 - RNA, 36 nt, Artificial Sequence
  Description of Artificial Sequence:  Enzymatic Nucleic Acid Molecule
ggugaagcugaugaggccguuaggccgaaaggacgu

SEQ ID NO: 2237 - RNA, 36 nt, Artificial Sequence
  Description of Artificial Sequence:  Enzymatic Nucleic Acid Molecule
gggugaacugaugaggccguuaggccgaaaaggacg

SEQ ID NO: 2238 - RNA, 36 nt, Artificial Sequence
  Description of Artificial Sequence:  Enzymatic Nucleic Acid Molecule
uugggugcugaugaggccguuaggccgaaagaagga

SEQ ID NO: 2239 - RNA, 36 nt, Artificial Sequence
  Description of Artificial Sequence:  Enzymatic Nucleic Acid Molecule
cuugggucugaugaggccguuaggccgaaaagaagg

SEQ ID NO: 2240 - RNA, 36 nt, Artificial Sequence
  Description of Artificial Sequence:  Enzymatic Nucleic Acid Molecule
ugagcugcugaugaggccguuaggccgaaauucucu

SEQ ID NO: 2241 - RNA, 36 nt, Artificial Sequence
  Description of Artificial Sequence:  Enzymatic Nucleic Acid Molecule
uguuuaucugaugaggccguuaggccgaaagcugga

SEQ ID NO: 2242 - RNA, 36 nt, Artificial Sequence
  Description of Artificial Sequence:  Enzymatic Nucleic Acid Molecule
ugguguucugaugaggccguuaggccgaaaugagcu

SEQ ID NO: 2243 - RNA, 36 nt, Artificial Sequence
  Description of Artificial Sequence:  Enzymatic Nucleic Acid Molecule
uccuguucugaugaggccguuaggccgaaaugugcc

SEQ ID NO: 2244 - RNA, 36 nt, Artificial Sequence
  Description of Artificial Sequence:  Enzymatic Nucleic Acid Molecule
guugaggcugaugaggccguuaggccgaaauucauu

SEQ ID NO: 2245 - RNA, 36 nt, Artificial Sequence
  Description of Artificial Sequence:  Enzymatic Nucleic Acid Molecule
cgguguucugaugaggccguuaggccgaaagggauu

SEQ ID NO: 2246 - RNA, 36 nt, Artificial Sequence
  Description of Artificial Sequence:  Enzymatic Nucleic Acid Molecule
ggcaaagcugaugaggccguuaggccgaaacccggu

SEQ ID NO: 2247 - RNA, 36 nt, Artificial Sequence
  Description of Artificial Sequence:  Enzymatic Nucleic Acid Molecule
cggcaaacugaugaggccguuaggccgaaaacccgg

SEQ ID NO: 2248 - RNA, 36 nt, Artificial Sequence
  Description of Artificial Sequence:  Enzymatic Nucleic Acid Molecule
ugcggcacugaugaggccguuaggccgaaagaaccc

SEQ ID NO: 2249 - RNA, 36 nt, Artificial Sequence
  Description of Artificial Sequence:  Enzymatic Nucleic Acid Molecule
gugcggccugaugaggccguuaggccgaaaagaacc

SEQ ID NO: 2250 - RNA, 36 nt, Artificial Sequence
  Description of Artificial Sequence:  Enzymatic Nucleic Acid Molecule
ugcguagcugaugaggccguuaggccgaaacagugc

SEQ ID NO: 2251 - RNA, 36 nt, Artificial Sequence
  Description of Artificial Sequence:  Enzymatic Nucleic Acid Molecule
gugcguacugaugaggccguuaggccgaaaacagug

SEQ ID NO: 2252 - RNA, 36 nt, Artificial Sequence
  Description of Artificial Sequence:  Enzymatic Nucleic Acid Molecule
gugugcgcugaugaggccguuaggccgaaagaacag

SEQ ID NO: 2253 - RNA, 36 nt, Artificial Sequence
  Description of Artificial Sequence:  Enzymatic Nucleic Acid Molecule
cgaguugcugaugaggccguuaggccgaaacuugug

SEQ ID NO: 2254 - RNA, 36 nt, Artificial Sequence
  Description of Artificial Sequence:  Enzymatic Nucleic Acid Molecule
acgaguucugaugaggccguuaggccgaaaacuugu

SEQ ID NO: 2255 - RNA, 36 nt, Artificial Sequence
  Description of Artificial Sequence:  Enzymatic Nucleic Acid Molecule
uccggaccugaugaggccguuaggccgaaaguugaa

SEQ ID NO: 2256 - RNA, 36 nt, Artificial Sequence
  Description of Artificial Sequence:  Enzymatic Nucleic Acid Molecule
gcauccgcugaugaggccguuaggccgaaacgaguu

SEQ ID NO: 2257 - RNA, 36 nt, Artificial Sequence
  Description of Artificial Sequence:  Enzymatic Nucleic Acid Molecule
gucgaugcugaugaggccguuaggccgaaagcugca

SEQ ID NO: 2258 - RNA, 36 nt, Artificial Sequence
  Description of Artificial Sequence:  Enzymatic Nucleic Acid Molecule
ggcucggcugaugaggccguuaggccgaaauaggug

SEQ ID NO: 2259 - RNA, 36 nt, Artificial Sequence
  Description of Artificial Sequence:  Enzymatic Nucleic Acid Molecule
agguccccugaugaggccguuaggccgaaaggcucg

SEQ ID NO: 2260 - RNA, 36 nt, Artificial Sequence
  Description of Artificial Sequence:  Enzymatic Nucleic Acid Molecule
ggccucucugaugaggccguuaggccgaaauccagg

SEQ ID NO: 2261 - RNA, 36 nt, Artificial Sequence
  Description of Artificial Sequence:  Enzymatic Nucleic Acid Molecule
cagcagucugaugaggccguuaggccgaaaggccuc

SEQ ID NO: 2262 - RNA, 36 nt, Artificial Sequence
  Description of Artificial Sequence:  Enzymatic Nucleic Acid Molecule
gaaacagcugaugaggccguuaggccgaaacacugg

SEQ ID NO: 2263 - RNA, 36 nt, Artificial Sequence
  Description of Artificial Sequence:  Enzymatic Nucleic Acid Molecule
ggggugacugaugaggccguuaggccgaaacaguac

SEQ ID NO: 2264 - RNA, 36 nt, Artificial Sequence
  Description of Artificial Sequence:  Enzymatic Nucleic Acid Molecule
uggggugcugaugaggccguuaggccgaaaacagua

SEQ ID NO: 2265 - RNA, 36 nt, Artificial Sequence
  Description of Artificial Sequence:  Enzymatic Nucleic Acid Molecule
uuggggucugaugaggccguuaggccgaaaaacagu

SEQ ID NO: 2266 - RNA, 36 nt, Artificial Sequence
  Description of Artificial Sequence:  Enzymatic Nucleic Acid Molecule
uguugagcugaugaggccguuaggccgaaagcagca

SEQ ID NO: 2267 - RNA, 36 nt, Artificial Sequence
  Description of Artificial Sequence:  Enzymatic Nucleic Acid Molecule
uuguugacugaugaggccguuaggccgaaaagcagc

SEQ ID NO: 2268 - RNA, 36 nt, Artificial Sequence
  Description of Artificial Sequence:  Enzymatic Nucleic Acid Molecule
uguuguucugaugaggccguuaggccgaaagaagca

SEQ ID NO: 2269 - RNA, 36 nt, Artificial Sequence
  Description of Artificial Sequence:  Enzymatic Nucleic Acid Molecule
cuuggugcugaugaggccguuaggccgaaacccagu

SEQ ID NO: 2270 - RNA, 36 nt, Artificial Sequence
  Description of Artificial Sequence:  Enzymatic Nucleic Acid Molecule
ucuuggucugaugaggccguuaggccgaaaacccag

SEQ ID NO: 2271 - RNA, 36 nt, Artificial Sequence
  Description of Artificial Sequence:  Enzymatic Nucleic Acid Molecule
cgaaagccugaugaggccguuaggccgaaauccgug

SEQ ID NO: 2272 - RNA, 36 nt, Artificial Sequence
  Description of Artificial Sequence:  Enzymatic Nucleic Acid Molecule
cuuccgacugaugaggccguuaggccgaaagcaauc

SEQ ID NO: 2273 - RNA, 36 nt, Artificial Sequence
  Description of Artificial Sequence:  Enzymatic Nucleic Acid Molecule
gcuuccgcugaugaggccguuaggccgaaaagcaau

SEQ ID NO: 2274 - RNA, 36 nt, Artificial Sequence
  Description of Artificial Sequence:  Enzymatic Nucleic Acid Molecule
ugcuucccugaugaggccguuaggccgaaaaagcaa

SEQ ID NO: 2275 - RNA, 36 nt, Artificial Sequence
  Description of Artificial Sequence:  Enzymatic Nucleic Acid Molecule
auacacccugaugaggccguuaggccgaaagguguu

SEQ ID NO: 2276 - RNA, 36 nt, Artificial Sequence
  Description of Artificial Sequence:  Enzymatic Nucleic Acid Molecule
ucaacuacugaugaggccguuaggccgaaacaccua

SEQ ID NO: 2277 - RNA, 36 nt, Artificial Sequence
  Description of Artificial Sequence:  Enzymatic Nucleic Acid Molecule
agucaaccugaugaggccguuaggccgaaauacacc

SEQ ID NO: 2278 - RNA, 36 nt, Artificial Sequence
  Description of Artificial Sequence:  Enzymatic Nucleic Acid Molecule
gguaguccugaugaggccguuaggccgaaacuauac

SEQ ID NO: 2279 - RNA, 36 nt, Artificial Sequence
  Description of Artificial Sequence:  Enzymatic Nucleic Acid Molecule
guaugggcugaugaggccguuaggccgaaagucaac

SEQ ID NO: 2280 - RNA, 36 nt, Artificial Sequence
  Description of Artificial Sequence:  Enzymatic Nucleic Acid Molecule
gagccugcugaugaggccguuaggccgaaaugggua

SEQ ID NO: 2281 - RNA, 36 nt, Artificial Sequence
  Description of Artificial Sequence:  Enzymatic Nucleic Acid Molecule
agugccacugaugaggccguuaggccgaaagccugu

SEQ ID NO: 2282 - RNA, 36 nt, Artificial Sequence
  Description of Artificial Sequence:  Enzymatic Nucleic Acid Molecule
gcaggggcugaugaggccguuaggccgaaagugcca

SEQ ID NO: 2283 - RNA, 36 nt, Artificial Sequence
  Description of Artificial Sequence:  Enzymatic Nucleic Acid Molecule
uaaaguucugaugaggccguuaggccgaaacagugc

SEQ ID NO: 2284 - RNA, 36 nt, Artificial Sequence
  Description of Artificial Sequence:  Enzymatic Nucleic Acid Molecule
gaugguacugaugaggccguuaggccgaaaguugac

SEQ ID NO: 2285 - RNA, 36 nt, Artificial Sequence
  Description of Artificial Sequence:  Enzymatic Nucleic Acid Molecule
agauggucugaugaggccguuaggccgaaaaguuga

SEQ ID NO: 2286 - RNA, 36 nt, Artificial Sequence
  Description of Artificial Sequence:  Enzymatic Nucleic Acid Molecule
aagauggcugaugaggccguuaggccgaaaaaguug

SEQ ID NO: 2287 - RNA, 36 nt, Artificial Sequence
  Description of Artificial Sequence:  Enzymatic Nucleic Acid Molecule
uaaccuucugaugaggccguuaggccgaaaagaugg

SEQ ID NO: 2288 - RNA, 36 nt, Artificial Sequence
  Description of Artificial Sequence:  Enzymatic Nucleic Acid Molecule
cuaaccucugaugaggccguuaggccgaaaaagaug

SEQ ID NO: 2289 - RNA, 36 nt, Artificial Sequence
  Description of Artificial Sequence:  Enzymatic Nucleic Acid Molecule
acauccucugaugaggccguuaggccgaaaccuuaa

SEQ ID NO: 2290 - RNA, 36 nt, Artificial Sequence
  Description of Artificial Sequence:  Enzymatic Nucleic Acid Molecule
uacaucccugaugaggccguuaggccgaaaaccuua

SEQ ID NO: 2291 - RNA, 36 nt, Artificial Sequence
  Description of Artificial Sequence:  Enzymatic Nucleic Acid Molecule
ccccacacugaugaggccguuaggccgaaacauccu

SEQ ID NO: 2292 - RNA, 36 nt, Artificial Sequence
  Description of Artificial Sequence:  Enzymatic Nucleic Acid Molecule
ucuccuccugaugaggccguuaggccgaaaguccag

SEQ ID NO: 2293 - RNA, 36 nt, Artificial Sequence
  Description of Artificial Sequence:  Enzymatic Nucleic Acid Molecule
aacagggcugaugaggccguuaggccgaaagugucu

SEQ ID NO: 2294 - RNA, 36 nt, Artificial Sequence
  Description of Artificial Sequence:  Enzymatic Nucleic Acid Molecule
gaacaggcugaugaggccguuaggccgaaaaguguc

SEQ ID NO: 2295 - RNA, 36 nt, Artificial Sequence
  Description of Artificial Sequence:  Enzymatic Nucleic Acid Molecule
gugaaggcugaugaggccguuaggccgaaacaggga

SEQ ID NO: 2296 - RNA, 36 nt, Artificial Sequence
  Description of Artificial Sequence:  Enzymatic Nucleic Acid Molecule
ggugaagcugaugaggccguuaggccgaaaacaggg

SEQ ID NO: 2297 - RNA, 36 nt, Artificial Sequence
  Description of Artificial Sequence:  Enzymatic Nucleic Acid Molecule
gguggugcugaugaggccguuaggccgaaaggaaca

SEQ ID NO: 2298 - RNA, 36 nt, Artificial Sequence
  Description of Artificial Sequence:  Enzymatic Nucleic Acid Molecule
ggguggucugaugaggccguuaggccgaaaaggaac

SEQ ID NO: 2299 - RNA, 36 nt, Artificial Sequence
  Description of Artificial Sequence:  Enzymatic Nucleic Acid Molecule
gagccggcugaugaggccguuaggccgaaagggugg

SEQ ID NO: 2300 - RNA, 36 nt, Artificial Sequence
  Description of Artificial Sequence:  Enzymatic Nucleic Acid Molecule
guggacacugaugaggccguuaggccgaaagccggu

SEQ ID NO: 2301 - RNA, 36 nt, Artificial Sequence
  Description of Artificial Sequence:  Enzymatic Nucleic Acid Molecule
accagugcugaugaggccguuaggccgaaacagagc

SEQ ID NO: 2302 - RNA, 36 nt, Artificial Sequence
  Description of Artificial Sequence:  Enzymatic Nucleic Acid Molecule
uggaucacugaugaggccguuaggccgaaaccagug

SEQ ID NO: 2303 - RNA, 36 nt, Artificial Sequence
  Description of Artificial Sequence:  Enzymatic Nucleic Acid Molecule
guggauccugaugaggccguuaggccgaaaaccagu

SEQ ID NO: 2304 - RNA, 36 nt, Artificial Sequence
  Description of Artificial Sequence:  Enzymatic Nucleic Acid Molecule
ggaggugcugaugaggccguuaggccgaaaucaaac

SEQ ID NO: 2305 - RNA, 36 nt, Artificial Sequence
  Description of Artificial Sequence:  Enzymatic Nucleic Acid Molecule
guacaggcugaugaggccguuaggccgaaacugcac

SEQ ID NO: 2306 - RNA, 36 nt, Artificial Sequence
  Description of Artificial Sequence:  Enzymatic Nucleic Acid Molecule
uauaccgcugaugaggccguuaggccgaaacaggua

SEQ ID NO: 2307 - RNA, 36 nt, Artificial Sequence
  Description of Artificial Sequence:  Enzymatic Nucleic Acid Molecule
gacccuacugaugaggccguuaggccgaaaccguac

SEQ ID NO: 2308 - RNA, 36 nt, Artificial Sequence
  Description of Artificial Sequence:  Enzymatic Nucleic Acid Molecule
cugaccccugaugaggccguuaggccgaaauaccgu

SEQ ID NO: 2309 - RNA, 36 nt, Artificial Sequence
  Description of Artificial Sequence:  Enzymatic Nucleic Acid Molecule
aaccgcucugaugaggccguuaggccgaaacccuau

SEQ ID NO: 2310 - RNA, 36 nt, Artificial Sequence
  Description of Artificial Sequence:  Enzymatic Nucleic Acid Molecule
aggagaccugaugaggccguuaggccgaaaccgcug

SEQ ID NO: 2311 - RNA, 36 nt, Artificial Sequence
  Description of Artificial Sequence:  Enzymatic Nucleic Acid Molecule
caaaggacugaugaggccguuaggccgaaacaaccg

SEQ ID NO: 2312 - RNA, 36 nt, Artificial Sequence
  Description of Artificial Sequence:  Enzymatic Nucleic Acid Molecule
cacaaagcugaugaggccguuaggccgaaagacaac

SEQ ID NO: 2313 - RNA, 36 nt, Artificial Sequence
  Description of Artificial Sequence:  Enzymatic Nucleic Acid Molecule
gaucacacugaugaggccguuaggccgaaaggagac

SEQ ID NO: 2314 - RNA, 36 nt, Artificial Sequence
  Description of Artificial Sequence:  Enzymatic Nucleic Acid Molecule
ugaucaccugaugaggccguuaggccgaaaaggaga

SEQ ID NO: 2315 - RNA, 36 nt, Artificial Sequence
  Description of Artificial Sequence:  Enzymatic Nucleic Acid Molecule
cccauuucugaugaggccguuaggccgaaaucacaa

SEQ ID NO: 2316 - RNA, 36 nt, Artificial Sequence
  Description of Artificial Sequence:  Enzymatic Nucleic Acid Molecule
cacgauacugaugaggccguuaggccgaaacuccca

SEQ ID NO: 2317 - RNA, 36 nt, Artificial Sequence
  Description of Artificial Sequence:  Enzymatic Nucleic Acid Molecule
aacacgacugaugaggccguuaggccgaaauacucc

SEQ ID NO: 2318 - RNA, 36 nt, Artificial Sequence
  Description of Artificial Sequence:  Enzymatic Nucleic Acid Molecule
gcaacaccugaugaggccguuaggccgaaauauacu

SEQ ID NO: 2319 - RNA, 36 nt, Artificial Sequence
  Description of Artificial Sequence:  Enzymatic Nucleic Acid Molecule
gaaaagccugaugaggccguuaggccgaaacacgau

SEQ ID NO: 2320 - RNA, 36 nt, Artificial Sequence
  Description of Artificial Sequence:  Enzymatic Nucleic Acid Molecule
gaaggaacugaugaggccguuaggccgaaagcaaca

SEQ ID NO: 2321 - RNA, 36 nt, Artificial Sequence
  Description of Artificial Sequence:  Enzymatic Nucleic Acid Molecule
agaaggacugaugaggccguuaggccgaaaagcaac

SEQ ID NO: 2322 - RNA, 36 nt, Artificial Sequence
  Description of Artificial Sequence:  Enzymatic Nucleic Acid Molecule
gagaaggcugaugaggccguuaggccgaaaaagcaa

SEQ ID NO: 2323 - RNA, 36 nt, Artificial Sequence
  Description of Artificial Sequence:  Enzymatic Nucleic Acid Molecule
ggagaagcugaugaggccguuaggccgaaaaaagca

SEQ ID NO: 2324 - RNA, 36 nt, Artificial Sequence
  Description of Artificial Sequence:  Enzymatic Nucleic Acid Molecule
ccaggagcugaugaggccguuaggccgaaaggaaaa

SEQ ID NO: 2325 - RNA, 36 nt, Artificial Sequence
  Description of Artificial Sequence:  Enzymatic Nucleic Acid Molecule
gccaggacugaugaggccguuaggccgaaaaggaaa

SEQ ID NO: 2326 - RNA, 36 nt, Artificial Sequence
  Description of Artificial Sequence:  Enzymatic Nucleic Acid Molecule
ccgccagcugaugaggccguuaggccgaaagaagga

SEQ ID NO: 2327 - RNA, 36 nt, Artificial Sequence
  Description of Artificial Sequence:  Enzymatic Nucleic Acid Molecule
cauccaccugaugaggccguuaggccgaaagcaggc

SEQ ID NO: 2328 - RNA, 36 nt, Artificial Sequence
  Description of Artificial Sequence:  Enzymatic Nucleic Acid Molecule
ccugggccugaugaggccguuaggccgaaaucagca

SEQ ID NO: 2329 - RNA, 36 nt, Artificial Sequence
  Description of Artificial Sequence:  Enzymatic Nucleic Acid Molecule
ggccaggcugaugaggccguuaggccgaaacgccgc

SEQ ID NO: 2330 - RNA, 36 nt, Artificial Sequence
  Description of Artificial Sequence:  Enzymatic Nucleic Acid Molecule
aggagagcugaugaggccguuaggccgaaaugccau

SEQ ID NO: 2331 - RNA, 36 nt, Artificial Sequence
  Description of Artificial Sequence:  Enzymatic Nucleic Acid Molecule
aaggagacugaugaggccguuaggccgaaaaugcca

SEQ ID NO: 2332 - RNA, 36 nt, Artificial Sequence
  Description of Artificial Sequence:  Enzymatic Nucleic Acid Molecule
ggaaggacugaugaggccguuaggccgaaagaaugc

SEQ ID NO: 2333 - RNA, 36 nt, Artificial Sequence
  Description of Artificial Sequence:  Enzymatic Nucleic Acid Molecule
aaggaagcugaugaggccguuaggccgaaagagaau

SEQ ID NO: 2334 - RNA, 36 nt, Artificial Sequence
  Description of Artificial Sequence:  Enzymatic Nucleic Acid Molecule
cacaaggcugaugaggccguuaggccgaaaggagag

SEQ ID NO: 2335 - RNA, 36 nt, Artificial Sequence
  Description of Artificial Sequence:  Enzymatic Nucleic Acid Molecule
acacaagcugaugaggccguuaggccgaaaaggaga

SEQ ID NO: 2336 - RNA, 36 nt, Artificial Sequence
  Description of Artificial Sequence:  Enzymatic Nucleic Acid Molecule
aaaacaccugaugaggccguuaggccgaaaggaagg

SEQ ID NO: 2337 - RNA, 36 nt, Artificial Sequence
  Description of Artificial Sequence:  Enzymatic Nucleic Acid Molecule
acagaaacugaugaggccguuaggccgaaacacaag

SEQ ID NO: 2338 - RNA, 36 nt, Artificial Sequence
  Description of Artificial Sequence:  Enzymatic Nucleic Acid Molecule
cacagaacugaugaggccguuaggccgaaaacacaa

SEQ ID NO: 2339 - RNA, 36 nt, Artificial Sequence
  Description of Artificial Sequence:  Enzymatic Nucleic Acid Molecule
gcacagacugaugaggccguuaggccgaaaaacaca

SEQ ID NO: 2340 - RNA, 36 nt, Artificial Sequence
  Description of Artificial Sequence:  Enzymatic Nucleic Acid Molecule
ggcacagcugaugaggccguuaggccgaaaaaacac

SEQ ID NO: 2341 - RNA, 36 nt, Artificial Sequence
  Description of Artificial Sequence:  Enzymatic Nucleic Acid Molecule
cggcacacugaugaggccguuaggccgaaaaaaaca

SEQ ID NO: 2342 - RNA, 36 nt, Artificial Sequence
  Description of Artificial Sequence:  Enzymatic Nucleic Acid Molecule
ggagcagcugaugaggccguuaggccgaaagcagcg

SEQ ID NO: 2343 - RNA, 36 nt, Artificial Sequence
  Description of Artificial Sequence:  Enzymatic Nucleic Acid Molecule
ugguggucugaugaggccguuaggccgaaacgccag

SEQ ID NO: 2344 - RNA, 36 nt, Artificial Sequence
  Description of Artificial Sequence:  Enzymatic Nucleic Acid Molecule
gugguggcugaugaggccguuaggccgaaaacgcca

SEQ ID NO: 2345 - RNA, 36 nt, Artificial Sequence
  Description of Artificial Sequence:  Enzymatic Nucleic Acid Molecule
uccacaccugaugaggccguuaggccgaaaugcagc

SEQ ID NO: 2346 - RNA, 36 nt, Artificial Sequence
  Description of Artificial Sequence:  Enzymatic Nucleic Acid Molecule
cuacaaacugaugaggccguuaggccgaaaccaccc

SEQ ID NO: 2347 - RNA, 36 nt, Artificial Sequence
  Description of Artificial Sequence:  Enzymatic Nucleic Acid Molecule
ccuacaacugaugaggccguuaggccgaaaaccacc

SEQ ID NO: 2348 - RNA, 36 nt, Artificial Sequence
  Description of Artificial Sequence:  Enzymatic Nucleic Acid Molecule
accuacacugaugaggccguuaggccgaaaaaccac

SEQ ID NO: 2349 - RNA, 36 nt, Artificial Sequence
  Description of Artificial Sequence:  Enzymatic Nucleic Acid Molecule
gaccuaccugaugaggccguuaggccgaaaaaacca

SEQ ID NO: 2350 - RNA, 36 nt, Artificial Sequence
  Description of Artificial Sequence:  Enzymatic Nucleic Acid Molecule
uuagacccugaugaggccguuaggccgaaacaaaaa

SEQ ID NO: 2351 - RNA, 36 nt, Artificial Sequence
  Description of Artificial Sequence:  Enzymatic Nucleic Acid Molecule
aguauuacugaugaggccguuaggccgaaaccuaca

SEQ ID NO: 2352 - RNA, 36 nt, Artificial Sequence
  Description of Artificial Sequence:  Enzymatic Nucleic Acid Molecule
agaguaucugaugaggccguuaggccgaaagaccua

SEQ ID NO: 2353 - RNA, 36 nt, Artificial Sequence
  Description of Artificial Sequence:  Enzymatic Nucleic Acid Molecule
ucaagagcugaugaggccguuaggccgaaauuagac

SEQ ID NO: 2354 - RNA, 36 nt, Artificial Sequence
  Description of Artificial Sequence:  Enzymatic Nucleic Acid Molecule
aggucaacugaugaggccguuaggccgaaaguauua

SEQ ID NO: 2355 - RNA, 36 nt, Artificial Sequence
  Description of Artificial Sequence:  Enzymatic Nucleic Acid Molecule
caagguccugaugaggccguuaggccgaaagaguau

SEQ ID NO: 2356 - RNA, 36 nt, Artificial Sequence
  Description of Artificial Sequence:  Enzymatic Nucleic Acid Molecule
uggugaccugaugaggccguuaggccgaaaggucaa

SEQ ID NO: 2357 - RNA, 36 nt, Artificial Sequence
  Description of Artificial Sequence:  Enzymatic Nucleic Acid Molecule
guguggucugaugaggccguuaggccgaaacaaggu

SEQ ID NO: 2358 - RNA, 36 nt, Artificial Sequence
  Description of Artificial Sequence:  Enzymatic Nucleic Acid Molecule
cacuuugcugaugaggccguuaggccgaaagugugg

SEQ ID NO: 2359 - RNA, 36 nt, Artificial Sequence
  Description of Artificial Sequence:  Enzymatic Nucleic Acid Molecule
ggcgaggcugaugaggccguuaggccgaaacacuuu

SEQ ID NO: 2360 - RNA, 36 nt, Artificial Sequence
  Description of Artificial Sequence:  Enzymatic Nucleic Acid Molecule
uggcgagcugaugaggccguuaggccgaaaacacuu

SEQ ID NO: 2361 - RNA, 36 nt, Artificial Sequence
  Description of Artificial Sequence:  Enzymatic Nucleic Acid Molecule
gccuggccugaugaggccguuaggccgaaaggaaca

SEQ ID NO: 2362 - RNA, 36 nt, Artificial Sequence
  Description of Artificial Sequence:  Enzymatic Nucleic Acid Molecule
accauaucugaugaggccguuaggccgaaagccugg

SEQ ID NO: 2363 - RNA, 36 nt, Artificial Sequence
  Description of Artificial Sequence:  Enzymatic Nucleic Acid Molecule
accaccacugaugaggccguuaggccgaaaugagcc

SEQ ID NO: 2364 - RNA, 36 nt, Artificial Sequence
  Description of Artificial Sequence:  Enzymatic Nucleic Acid Molecule
cuggugacugaugaggccguuaggccgaaaaaguau

SEQ ID NO: 2365 - RNA, 36 nt, Artificial Sequence
  Description of Artificial Sequence:  Enzymatic Nucleic Acid Molecule
cccuggucugaugaggccguuaggccgaaauaaagu

SEQ ID NO: 2366 - RNA, 36 nt, Artificial Sequence
  Description of Artificial Sequence:  Enzymatic Nucleic Acid Molecule
caaagaucugaugaggccguuaggccgaaagcucug

SEQ ID NO: 2367 - RNA, 36 nt, Artificial Sequence
  Description of Artificial Sequence:  Enzymatic Nucleic Acid Molecule
ugucaaacugaugaggccguuaggccgaaauuagcu

SEQ ID NO: 2368 - RNA, 36 nt, Artificial Sequence
  Description of Artificial Sequence:  Enzymatic Nucleic Acid Molecule
aaugucacugaugaggccguuaggccgaaagauuag

SEQ ID NO: 2369 - RNA, 36 nt, Artificial Sequence
  Description of Artificial Sequence:  Enzymatic Nucleic Acid Molecule
uaauguccugaugaggccguuaggccgaaaagauua

SEQ ID NO: 2370 - RNA, 36 nt, Artificial Sequence
  Description of Artificial Sequence:  Enzymatic Nucleic Acid Molecule
guuuggucugaugaggccguuaggccgaaaugucaa

SEQ ID NO: 2371 - RNA, 36 nt, Artificial Sequence
  Description of Artificial Sequence:  Enzymatic Nucleic Acid Molecule
aguuuggcugaugaggccguuaggccgaaaauguca

SEQ ID NO: 2372 - RNA, 36 nt, Artificial Sequence
  Description of Artificial Sequence:  Enzymatic Nucleic Acid Molecule
cgagcagcugaugaggccguuaggccgaaaguuugg

SEQ ID NO: 2373 - RNA, 36 nt, Artificial Sequence
  Description of Artificial Sequence:  Enzymatic Nucleic Acid Molecule
gaauggccugaugaggccguuaggccgaaagcagga

SEQ ID NO: 2374 - RNA, 36 nt, Artificial Sequence
  Description of Artificial Sequence:  Enzymatic Nucleic Acid Molecule
gaccgagcugaugaggccguuaggccgaaauggcga

SEQ ID NO: 2375 - RNA, 36 nt, Artificial Sequence
  Description of Artificial Sequence:  Enzymatic Nucleic Acid Molecule
ggaccgacugaugaggccguuaggccgaaaauggcg

SEQ ID NO: 2376 - RNA, 36 nt, Artificial Sequence
  Description of Artificial Sequence:  Enzymatic Nucleic Acid Molecule
gcggacccugaugaggccguuaggccgaaagaaugg

SEQ ID NO: 2377 - RNA, 36 nt, Artificial Sequence
  Description of Artificial Sequence:  Enzymatic Nucleic Acid Molecule
augagcgcugaugaggccguuaggccgaaaccgaga

SEQ ID NO: 2378 - RNA, 36 nt, Artificial Sequence
  Description of Artificial Sequence:  Enzymatic Nucleic Acid Molecule
gcaccaucugaugaggccguuaggccgaaagcggac

SEQ ID NO: 2379 - RNA, 36 nt, Artificial Sequence
  Description of Artificial Sequence:  Enzymatic Nucleic Acid Molecule
cagccugcugaugaggccguuaggccgaaagcacca

SEQ ID NO: 2380 - RNA, 36 nt, Artificial Sequence
  Description of Artificial Sequence:  Enzymatic Nucleic Acid Molecule
uacaaagcugaugaggccguuaggccgaaacggcau

SEQ ID NO: 2381 - RNA, 36 nt, Artificial Sequence
  Description of Artificial Sequence:  Enzymatic Nucleic Acid Molecule
gcguacacugaugaggccguuaggccgaaaguacgg

SEQ ID NO: 2382 - RNA, 36 nt, Artificial Sequence
  Description of Artificial Sequence:  Enzymatic Nucleic Acid Molecule
cgcguaccugaugaggccguuaggccgaaaaguacg

SEQ ID NO: 2383 - RNA, 36 nt, Artificial Sequence
  Description of Artificial Sequence:  Enzymatic Nucleic Acid Molecule
gagcgcgcugaugaggccguuaggccgaaacaaagu

SEQ ID NO: 2384 - RNA, 36 nt, Artificial Sequence
  Description of Artificial Sequence:  Enzymatic Nucleic Acid Molecule
agccccucugaugaggccguuaggccgaaagcgcgu

SEQ ID NO: 2385 - RNA, 36 nt, Artificial Sequence
  Description of Artificial Sequence:  Enzymatic Nucleic Acid Molecule
cacgaaucugaugaggccguuaggccgaaagccccu

SEQ ID NO: 2386 - RNA, 36 nt, Artificial Sequence
  Description of Artificial Sequence:  Enzymatic Nucleic Acid Molecule
gcacgaacugaugaggccguuaggccgaaaagcccc

SEQ ID NO: 2387 - RNA, 36 nt, Artificial Sequence
  Description of Artificial Sequence:  Enzymatic Nucleic Acid Molecule
augcacgcugaugaggccguuaggccgaaauaagcc

SEQ ID NO: 2388 - RNA, 36 nt, Artificial Sequence
  Description of Artificial Sequence:  Enzymatic Nucleic Acid Molecule
caugcaccugaugaggccguuaggccgaaaauaagc

SEQ ID NO: 2389 - RNA, 36 nt, Artificial Sequence
  Description of Artificial Sequence:  Enzymatic Nucleic Acid Molecule
ccgcacccugaugaggccguuaggccgaaacaugca

SEQ ID NO: 2390 - RNA, 36 nt, Artificial Sequence
  Description of Artificial Sequence:  Enzymatic Nucleic Acid Molecule
cuccggccugaugaggccguuaggccgaaacuuucc

SEQ ID NO: 2391 - RNA, 36 nt, Artificial Sequence
  Description of Artificial Sequence:  Enzymatic Nucleic Acid Molecule
acguacgcugaugaggccguuaggccgaaaccuguc

SEQ ID NO: 2392 - RNA, 36 nt, Artificial Sequence
  Description of Artificial Sequence:  Enzymatic Nucleic Acid Molecule
auagacgcugaugaggccguuaggccgaaacguacc

SEQ ID NO: 2393 - RNA, 36 nt, Artificial Sequence
  Description of Artificial Sequence:  Enzymatic Nucleic Acid Molecule
ggucauacugaugaggccguuaggccgaaacguacg

SEQ ID NO: 2394 - RNA, 36 nt, Artificial Sequence
  Description of Artificial Sequence:  Enzymatic Nucleic Acid Molecule
auggucacugaugaggccguuaggccgaaagacgua

SEQ ID NO: 2395 - RNA, 36 nt, Artificial Sequence
  Description of Artificial Sequence:  Enzymatic Nucleic Acid Molecule
gggguaacugaugaggccguuaggccgaaaugguca

SEQ ID NO: 2396 - RNA, 36 nt, Artificial Sequence
  Description of Artificial Sequence:  Enzymatic Nucleic Acid Molecule
gcggggucugaugaggccguuaggccgaaagauggu

SEQ ID NO: 2397 - RNA, 36 nt, Artificial Sequence
  Description of Artificial Sequence:  Enzymatic Nucleic Acid Molecule
agcggggcugaugaggccguuaggccgaaaagaugg

SEQ ID NO: 2398 - RNA, 36 nt, Artificial Sequence
  Description of Artificial Sequence:  Enzymatic Nucleic Acid Molecule
cgggcuccugaugaggccguuaggccgaaacugcca

SEQ ID NO: 2399 - RNA, 36 nt, Artificial Sequence
  Description of Artificial Sequence:  Enzymatic Nucleic Acid Molecule
ugucagacugaugaggccguuaggccgaaaagacga

SEQ ID NO: 2400 - RNA, 36 nt, Artificial Sequence
  Description of Artificial Sequence:  Enzymatic Nucleic Acid Molecule
caugucacugaugaggccguuaggccgaaagaagac

SEQ ID NO: 2401 - RNA, 36 nt, Artificial Sequence
  Description of Artificial Sequence:  Enzymatic Nucleic Acid Molecule
gucccagcugaugaggccguuaggccgaaaguaucu

SEQ ID NO: 2402 - RNA, 36 nt, Artificial Sequence
  Description of Artificial Sequence:  Enzymatic Nucleic Acid Molecule
ggucccacugaugaggccguuaggccgaaaaguauc

SEQ ID NO: 2403 - RNA, 36 nt, Artificial Sequence
  Description of Artificial Sequence:  Enzymatic Nucleic Acid Molecule
ucaaugccugaugaggccguuaggccgaaaucggcc

SEQ ID NO: 2404 - RNA, 36 nt, Artificial Sequence
  Description of Artificial Sequence:  Enzymatic Nucleic Acid Molecule
gcccuuccugaugaggccguuaggccgaaaugcuau

SEQ ID NO: 2405 - RNA, 36 nt, Artificial Sequence
  Description of Artificial Sequence:  Enzymatic Nucleic Acid Molecule
uugggcgcugaugaggccguuaggccgaaaggccgu

SEQ ID NO: 2406 - RNA, 36 nt, Artificial Sequence
  Description of Artificial Sequence:  Enzymatic Nucleic Acid Molecule
aaccaagcugaugaggccguuaggccgaaaggcccc

SEQ ID NO: 2407 - RNA, 36 nt, Artificial Sequence
  Description of Artificial Sequence:  Enzymatic Nucleic Acid Molecule
ugcaacccugaugaggccguuaggccgaaaguaggc

SEQ ID NO: 2408 - RNA, 36 nt, Artificial Sequence
  Description of Artificial Sequence:  Enzymatic Nucleic Acid Molecule
acaaugccugaugaggccguuaggccgaaaccaagu

SEQ ID NO: 2409 - RNA, 36 nt, Artificial Sequence
  Description of Artificial Sequence:  Enzymatic Nucleic Acid Molecule
uaguaaccugaugaggccguuaggccgaaaugcaac

SEQ ID NO: 2410 - RNA, 36 nt, Artificial Sequence
  Description of Artificial Sequence:  Enzymatic Nucleic Acid Molecule
ggcuagucugaugaggccguuaggccgaaacaaugc

SEQ ID NO: 2411 - RNA, 36 nt, Artificial Sequence
  Description of Artificial Sequence:  Enzymatic Nucleic Acid Molecule
aggcuagcugaugaggccguuaggccgaaaacaaug

SEQ ID NO: 2412 - RNA, 36 nt, Artificial Sequence
  Description of Artificial Sequence:  Enzymatic Nucleic Acid Molecule
gugaggccugaugaggccguuaggccgaaaguaaca

SEQ ID NO: 2413 - RNA, 36 nt, Artificial Sequence
  Description of Artificial Sequence:  Enzymatic Nucleic Acid Molecule
ccccuuccugaugaggccguuaggccgaaaccuggu

SEQ ID NO: 2414 - RNA, 36 nt, Artificial Sequence
  Description of Artificial Sequence:  Enzymatic Nucleic Acid Molecule
caggaaacugaugaggccguuaggccgaaauugugu

SEQ ID NO: 2415 - RNA, 36 nt, Artificial Sequence
  Description of Artificial Sequence:  Enzymatic Nucleic Acid Molecule
gccaggacugaugaggccguuaggccgaaagauugu

SEQ ID NO: 2416 - RNA, 36 nt, Artificial Sequence
  Description of Artificial Sequence:  Enzymatic Nucleic Acid Molecule
cgccaggcugaugaggccguuaggccgaaaagauug

SEQ ID NO: 2417 - RNA, 36 nt, Artificial Sequence
  Description of Artificial Sequence:  Enzymatic Nucleic Acid Molecule
ucgccagcugaugaggccguuaggccgaaaaagauu

SEQ ID NO: 2418 - RNA, 36 nt, Artificial Sequence
  Description of Artificial Sequence:  Enzymatic Nucleic Acid Molecule
caccauucugaugaggccguuaggccgaaacgcagg

SEQ ID NO: 2419 - RNA, 36 nt, Artificial Sequence
  Description of Artificial Sequence:  Enzymatic Nucleic Acid Molecule
acaccaucugaugaggccguuaggccgaaaacgcag

SEQ ID NO: 2420 - RNA, 36 nt, Artificial Sequence
  Description of Artificial Sequence:  Enzymatic Nucleic Acid Molecule
cguggaacugaugaggccguuaggccgaaacggucc

SEQ ID NO: 2421 - RNA, 36 nt, Artificial Sequence
  Description of Artificial Sequence:  Enzymatic Nucleic Acid Molecule
gccguggcugaugaggccguuaggccgaaagacggu

SEQ ID NO: 2422 - RNA, 36 nt, Artificial Sequence
  Description of Artificial Sequence:  Enzymatic Nucleic Acid Molecule
cgccgugcugaugaggccguuaggccgaaaagacgg

SEQ ID NO: 2423 - RNA, 36 nt, Artificial Sequence
  Description of Artificial Sequence:  Enzymatic Nucleic Acid Molecule
uuugggucugaugaggccguuaggccgaaauugggc

SEQ ID NO: 2424 - RNA, 36 nt, Artificial Sequence
  Description of Artificial Sequence:  Enzymatic Nucleic Acid Molecule
auuagugcugaugaggccguuaggccgaaacauuug

SEQ ID NO: 2425 - RNA, 36 nt, Artificial Sequence
  Description of Artificial Sequence:  Enzymatic Nucleic Acid Molecule
ucuacaucugaugaggccguuaggccgaaaguguac

SEQ ID NO: 2426 - RNA, 36 nt, Artificial Sequence
  Description of Artificial Sequence:  Enzymatic Nucleic Acid Molecule
cuugguccugaugaggccguuaggccgaaacauuag

SEQ ID NO: 2427 - RNA, 36 nt, Artificial Sequence
  Description of Artificial Sequence:  Enzymatic Nucleic Acid Molecule
agccgaccugaugaggccguuaggccgaaaggucuu

SEQ ID NO: 2428 - RNA, 36 nt, Artificial Sequence
  Description of Artificial Sequence:  Enzymatic Nucleic Acid Molecule
gccagcccugaugaggccguuaggccgaaacgaggu

SEQ ID NO: 2429 - RNA, 36 nt, Artificial Sequence
  Description of Artificial Sequence:  Enzymatic Nucleic Acid Molecule
uccgagccugaugaggccguuaggccgaaaccgcag

SEQ ID NO: 2430 - RNA, 36 nt, Artificial Sequence
  Description of Artificial Sequence:  Enzymatic Nucleic Acid Molecule
ccggaaucugaugaggccguuaggccgaaacgucag

SEQ ID NO: 2431 - RNA, 36 nt, Artificial Sequence
  Description of Artificial Sequence:  Enzymatic Nucleic Acid Molecule
aauaggacugaugaggccguuaggccgaaacggguc

SEQ ID NO: 2432 - RNA, 36 nt, Artificial Sequence
  Description of Artificial Sequence:  Enzymatic Nucleic Acid Molecule
caaauagcugaugaggccguuaggccgaaagacggg

SEQ ID NO: 2433 - RNA, 36 nt, Artificial Sequence
  Description of Artificial Sequence:  Enzymatic Nucleic Acid Molecule
cuucaaacugaugaggccguuaggccgaaaggagac

SEQ ID NO: 2434 - RNA, 36 nt, Artificial Sequence
  Description of Artificial Sequence:  Enzymatic Nucleic Acid Molecule
cccuucacugaugaggccguuaggccgaaauaggag

SEQ ID NO: 2435 - RNA, 36 nt, Artificial Sequence
  Description of Artificial Sequence:  Enzymatic Nucleic Acid Molecule
gcccuuccugaugaggccguuaggccgaaaauagga

SEQ ID NO: 2436 - RNA, 36 nt, Artificial Sequence
  Description of Artificial Sequence:  Enzymatic Nucleic Acid Molecule
acccgaacugaugaggccguuaggccgaaagcccuu

SEQ ID NO: 2437 - RNA, 36 nt, Artificial Sequence
  Description of Artificial Sequence:  Enzymatic Nucleic Acid Molecule
ccacccgcugaugaggccguuaggccgaaagagccc

SEQ ID NO: 2438 - RNA, 36 nt, Artificial Sequence
  Description of Artificial Sequence:  Enzymatic Nucleic Acid Molecule
ggguaugcugaugaggccguuaggccgaaaguccac

SEQ ID NO: 2439 - RNA, 36 nt, Artificial Sequence
  Description of Artificial Sequence:  Enzymatic Nucleic Acid Molecule
cggguaucugaugaggccguuaggccgaaaagucca

SEQ ID NO: 2440 - RNA, 36 nt, Artificial Sequence
  Description of Artificial Sequence:  Enzymatic Nucleic Acid Molecule
caacgggcugaugaggccguuaggccgaaaugaagu

SEQ ID NO: 2441 - RNA, 36 nt, Artificial Sequence
  Description of Artificial Sequence:  Enzymatic Nucleic Acid Molecule
uagacuccugaugaggccguuaggccgaaacgggua

SEQ ID NO: 2442 - RNA, 36 nt, Artificial Sequence
  Description of Artificial Sequence:  Enzymatic Nucleic Acid Molecule
uuccauacugaugaggccguuaggccgaaacucaac

SEQ ID NO: 2443 - RNA, 36 nt, Artificial Sequence
  Description of Artificial Sequence:  Enzymatic Nucleic Acid Molecule
guuuccacugaugaggccguuaggccgaaagacuca

SEQ ID NO: 2444 - RNA, 36 nt, Artificial Sequence
  Description of Artificial Sequence:  Enzymatic Nucleic Acid Molecule
cgcauagcugaugaggccguuaggccgaaaguuucc

SEQ ID NO: 2445 - RNA, 36 nt, Artificial Sequence
  Description of Artificial Sequence:  Enzymatic Nucleic Acid Molecule
gaccgcacugaugaggccguuaggccgaaaguaguu

SEQ ID NO: 2446 - RNA, 36 nt, Artificial Sequence
  Description of Artificial Sequence:  Enzymatic Nucleic Acid Molecule
gaccgggcugaugaggccguuaggccgaaaccgcau

SEQ ID NO: 2447 - RNA, 36 nt, Artificial Sequence
  Description of Artificial Sequence:  Enzymatic Nucleic Acid Molecule
ccgugaacugaugaggccguuaggccgaaaccgggg

SEQ ID NO: 2448 - RNA, 36 nt, Artificial Sequence
  Description of Artificial Sequence:  Enzymatic Nucleic Acid Molecule
guccgugcugaugaggccguuaggccgaaagaccgg

SEQ ID NO: 2449 - RNA, 36 nt, Artificial Sequence
  Description of Artificial Sequence:  Enzymatic Nucleic Acid Molecule
uguccgucugaugaggccguuaggccgaaaagaccg

SEQ ID NO: 2450 - RNA, 36 nt, Artificial Sequence
  Description of Artificial Sequence:  Enzymatic Nucleic Acid Molecule
gggagaucugaugaggccguuaggccgaaaguuguc

SEQ ID NO: 2451 - RNA, 36 nt, Artificial Sequence
  Description of Artificial Sequence:  Enzymatic Nucleic Acid Molecule
cgggggacugaugaggccguuaggccgaaaugaguu

SEQ ID NO: 2452 - RNA, 36 nt, Artificial Sequence
  Description of Artificial Sequence:  Enzymatic Nucleic Acid Molecule
gccggggcugaugaggccguuaggccgaaagaugag

SEQ ID NO: 2453 - RNA, 36 nt, Artificial Sequence
  Description of Artificial Sequence:  Enzymatic Nucleic Acid Molecule
ucugcggcugaugaggccguuaggccgaaacggccg

SEQ ID NO: 2454 - RNA, 36 nt, Artificial Sequence
  Description of Artificial Sequence:  Enzymatic Nucleic Acid Molecule
cacuuggcugaugaggccguuaggccgaaaugucug

SEQ ID NO: 2455 - RNA, 36 nt, Artificial Sequence
  Description of Artificial Sequence:  Enzymatic Nucleic Acid Molecule
ccacuugcugaugaggccguuaggccgaaaaugucu

SEQ ID NO: 2456 - RNA, 36 nt, Artificial Sequence
  Description of Artificial Sequence:  Enzymatic Nucleic Acid Molecule
gcguguacugaugaggccguuaggccgaaaugggcc

SEQ ID NO: 2457 - RNA, 36 nt, Artificial Sequence
  Description of Artificial Sequence:  Enzymatic Nucleic Acid Molecule
gagcgugcugaugaggccguuaggccgaaagauggg

SEQ ID NO: 2458 - RNA, 36 nt, Artificial Sequence
  Description of Artificial Sequence:  Enzymatic Nucleic Acid Molecule
ccaguggcugaugaggccguuaggccgaaagcgugu

SEQ ID NO: 2459 - RNA, 36 nt, Artificial Sequence
  Description of Artificial Sequence:  Enzymatic Nucleic Acid Molecule
ggacgagcugaugaggccguuaggccgaaaccuugu

SEQ ID NO: 2460 - RNA, 36 nt, Artificial Sequence
  Description of Artificial Sequence:  Enzymatic Nucleic Acid Molecule
ucaggaccugaugaggccguuaggccgaaaguaccu

SEQ ID NO: 2461 - RNA, 36 nt, Artificial Sequence
  Description of Artificial Sequence:  Enzymatic Nucleic Acid Molecule
gguucagcugaugaggccguuaggccgaaacgagua

SEQ ID NO: 2462 - RNA, 36 nt, Artificial Sequence
  Description of Artificial Sequence:  Enzymatic Nucleic Acid Molecule
ggcaacacugaugaggccguuaggccgaaauggguu

SEQ ID NO: 2463 - RNA, 36 nt, Artificial Sequence
  Description of Artificial Sequence:  Enzymatic Nucleic Acid Molecule
aaaaccccugaugaggccguuaggccgaaagguggc

SEQ ID NO: 2464 - RNA, 36 nt, Artificial Sequence
  Description of Artificial Sequence:  Enzymatic Nucleic Acid Molecule
gccccaacugaugaggccguuaggccgaaacccaag

SEQ ID NO: 2465 - RNA, 36 nt, Artificial Sequence
  Description of Artificial Sequence:  Enzymatic Nucleic Acid Molecule
cgccccacugaugaggccguuaggccgaaaacccaa

SEQ ID NO: 2466 - RNA, 36 nt, Artificial Sequence
  Description of Artificial Sequence:  Enzymatic Nucleic Acid Molecule
acgcccccugaugaggccguuaggccgaaaaaccca

SEQ ID NO: 2467 - RNA, 36 nt, Artificial Sequence
  Description of Artificial Sequence:  Enzymatic Nucleic Acid Molecule
agacauacugaugaggccguuaggccgaaacgcccc

SEQ ID NO: 2468 - RNA, 36 nt, Artificial Sequence
  Description of Artificial Sequence:  Enzymatic Nucleic Acid Molecule
uuagacacugaugaggccguuaggccgaaauacgcc

SEQ ID NO: 2469 - RNA, 36 nt, Artificial Sequence
  Description of Artificial Sequence:  Enzymatic Nucleic Acid Molecule
ugccuuacugaugaggccguuaggccgaaacauaua

SEQ ID NO: 2470 - RNA, 36 nt, Artificial Sequence
  Description of Artificial Sequence:  Enzymatic Nucleic Acid Molecule
ugugccucugaugaggccguuaggccgaaagacaua

SEQ ID NO: 2471 - RNA, 36 nt, Artificial Sequence
  Description of Artificial Sequence:  Enzymatic Nucleic Acid Molecule
gggucggcugaugaggccguuaggccgaaaccaugu

SEQ ID NO: 2472 - RNA, 36 nt, Artificial Sequence
  Description of Artificial Sequence:  Enzymatic Nucleic Acid Molecule
ccguggucugaugaggccguuaggccgaaauggucc

SEQ ID NO: 2473 - RNA, 36 nt, Artificial Sequence
  Description of Artificial Sequence:  Enzymatic Nucleic Acid Molecule
cccguggcugaugaggccguuaggccgaaaaugguc

SEQ ID NO: 2474 - RNA, 36 nt, Artificial Sequence
  Description of Artificial Sequence:  Enzymatic Nucleic Acid Molecule
aguacgucugaugaggccguuaggccgaaauggggg

SEQ ID NO: 2475 - RNA, 36 nt, Artificial Sequence
  Description of Artificial Sequence:  Enzymatic Nucleic Acid Molecule
gguggagcugaugaggccguuaggccgaaacgugau

SEQ ID NO: 2476 - RNA, 36 nt, Artificial Sequence
  Description of Artificial Sequence:  Enzymatic Nucleic Acid Molecule
auaggugcugaugaggccguuaggccgaaaguacgu

SEQ ID NO: 2477 - RNA, 36 nt, Artificial Sequence
  Description of Artificial Sequence:  Enzymatic Nucleic Acid Molecule
cccccagcugaugaggccguuaggccgaaacaucca

SEQ ID NO: 2478 - RNA, 36 nt, Artificial Sequence
  Description of Artificial Sequence:  Enzymatic Nucleic Acid Molecule
gcccccacugaugaggccguuaggccgaaaacaucc

SEQ ID NO: 2479 - RNA, 36 nt, Artificial Sequence
  Description of Artificial Sequence:  Enzymatic Nucleic Acid Molecule
gauaucacugaugaggccguuaggccgaaaggcgcc

SEQ ID NO: 2480 - RNA, 36 nt, Artificial Sequence
  Description of Artificial Sequence:  Enzymatic Nucleic Acid Molecule
auuaugacugaugaggccguuaggccgaaaucauag

SEQ ID NO: 2481 - RNA, 36 nt, Artificial Sequence
  Description of Artificial Sequence:  Enzymatic Nucleic Acid Molecule
auauuaucugaugaggccguuaggccgaaauaucau

SEQ ID NO: 2482 - RNA, 36 nt, Artificial Sequence
  Description of Artificial Sequence:  Enzymatic Nucleic Acid Molecule
gucaguucugaugaggccguuaggccgaaaguggca

SEQ ID NO: 2483 - RNA, 36 nt, Artificial Sequence
  Description of Artificial Sequence:  Enzymatic Nucleic Acid Molecule
gguaguccugaugaggccguuaggccgaaagucagu

SEQ ID NO: 2484 - RNA, 36 nt, Artificial Sequence
  Description of Artificial Sequence:  Enzymatic Nucleic Acid Molecule
aggauggcugaugaggccguuaggccgaaagucgag

SEQ ID NO: 2485 - RNA, 36 nt, Artificial Sequence
  Description of Artificial Sequence:  Enzymatic Nucleic Acid Molecule
ugcccagcugaugaggccguuaggccgaaaugguag

SEQ ID NO: 2486 - RNA, 36 nt, Artificial Sequence
  Description of Artificial Sequence:  Enzymatic Nucleic Acid Molecule
cugugcccugaugaggccguuaggccgaaaugccca

SEQ ID NO: 2487 - RNA, 36 nt, Artificial Sequence
  Description of Artificial Sequence:  Enzymatic Nucleic Acid Molecule
ggaggcgcugaugaggccguuaggccgaaagcggug

SEQ ID NO: 2488 - RNA, 36 nt, Artificial Sequence
  Description of Artificial Sequence:  Enzymatic Nucleic Acid Molecule
gaucccgcugaugaggccguuaggccgaaaggcgua

SEQ ID NO: 2489 - RNA, 36 nt, Artificial Sequence
  Description of Artificial Sequence:  Enzymatic Nucleic Acid Molecule
gguaacccugaugaggccguuaggccgaaaucccgg

SEQ ID NO: 2490 - RNA, 36 nt, Artificial Sequence
  Description of Artificial Sequence:  Enzymatic Nucleic Acid Molecule
gcacggucugaugaggccguuaggccgaaaccgauc

SEQ ID NO: 2491 - RNA, 36 nt, Artificial Sequence
  Description of Artificial Sequence:  Enzymatic Nucleic Acid Molecule
ggcacggcugaugaggccguuaggccgaaaaccgau

SEQ ID NO: 2492 - RNA, 36 nt, Artificial Sequence
  Description of Artificial Sequence:  Enzymatic Nucleic Acid Molecule
ccuccuccugaugaggccguuaggccgaaauauuug

SEQ ID NO: 2493 - RNA, 36 nt, Artificial Sequence
  Description of Artificial Sequence:  Enzymatic Nucleic Acid Molecule
uuggacacugaugaggccguuaggccgaaagccacc

SEQ ID NO: 2494 - RNA, 36 nt, Artificial Sequence
  Description of Artificial Sequence:  Enzymatic Nucleic Acid Molecule
gccauagcugaugaggccguuaggccgaaaggggau

SEQ ID NO: 2495 - RNA, 36 nt, Artificial Sequence
  Description of Artificial Sequence:  Enzymatic Nucleic Acid Molecule
ugccauacugaugaggccguuaggccgaaaagggga

SEQ ID NO: 2496 - RNA, 36 nt, Artificial Sequence
  Description of Artificial Sequence:  Enzymatic Nucleic Acid Molecule
cuugccacugaugaggccguuaggccgaaagaaggg

SEQ ID NO: 2497 - RNA, 36 nt, Artificial Sequence
  Description of Artificial Sequence:  Enzymatic Nucleic Acid Molecule
aaaaugacugaugaggccguuaggccgaaaugccuu

SEQ ID NO: 2498 - RNA, 36 nt, Artificial Sequence
  Description of Artificial Sequence:  Enzymatic Nucleic Acid Molecule
agaaaaucugaugaggccguuaggccgaaagaugcc

SEQ ID NO: 2499 - RNA, 36 nt, Artificial Sequence
  Description of Artificial Sequence:  Enzymatic Nucleic Acid Molecule
ggcagaacugaugaggccguuaggccgaaaugagau

SEQ ID NO: 2500 - RNA, 36 nt, Artificial Sequence
  Description of Artificial Sequence:  Enzymatic Nucleic Acid Molecule
uggcagacugaugaggccguuaggccgaaaaugaga

SEQ ID NO: 2501 - RNA, 36 nt, Artificial Sequence
  Description of Artificial Sequence:  Enzymatic Nucleic Acid Molecule
guggcagcugaugaggccguuaggccgaaaaaugag

SEQ ID NO: 2502 - RNA, 36 nt, Artificial Sequence
  Description of Artificial Sequence:  Enzymatic Nucleic Acid Molecule
aguggcacugaugaggccguuaggccgaaaaaauga

SEQ ID NO: 2503 - RNA, 36 nt, Artificial Sequence
  Description of Artificial Sequence:  Enzymatic Nucleic Acid Molecule
uugcggccugaugaggccguuaggccgaaagcucau

SEQ ID NO: 2504 - RNA, 36 nt, Artificial Sequence
  Description of Artificial Sequence:  Enzymatic Nucleic Acid Molecule
gaggccucugaugaggccguuaggccgaaacagcuu

SEQ ID NO: 2505 - RNA, 36 nt, Artificial Sequence
  Description of Artificial Sequence:  Enzymatic Nucleic Acid Molecule
ugauucccugaugaggccguuaggccgaaaggccug

SEQ ID NO: 2506 - RNA, 36 nt, Artificial Sequence
  Description of Artificial Sequence:  Enzymatic Nucleic Acid Molecule
acgucaacugaugaggccguuaggccgaaaccccgg

SEQ ID NO: 2507 - RNA, 36 nt, Artificial Sequence
  Description of Artificial Sequence:  Enzymatic Nucleic Acid Molecule
acacguccugaugaggccguuaggccgaaagacccc

SEQ ID NO: 2508 - RNA, 36 nt, Artificial Sequence
  Description of Artificial Sequence:  Enzymatic Nucleic Acid Molecule
uaugacgcugaugaggccguuaggccgaaacacguc

SEQ ID NO: 2509 - RNA, 36 nt, Artificial Sequence
  Description of Artificial Sequence:  Enzymatic Nucleic Acid Molecule
cgauaaccugaugaggccguuaggccgaaacaucuc

SEQ ID NO: 2510 - RNA, 36 nt, Artificial Sequence
  Description of Artificial Sequence:  Enzymatic Nucleic Acid Molecule
ccacgaucugaugaggccguuaggccgaaacgacau

SEQ ID NO: 2511 - RNA, 36 nt, Artificial Sequence
  Description of Artificial Sequence:  Enzymatic Nucleic Acid Molecule
gccacgacugaugaggccguuaggccgaaaacgaca

SEQ ID NO: 2512 - RNA, 36 nt, Artificial Sequence
  Description of Artificial Sequence:  Enzymatic Nucleic Acid Molecule
uugccaccugaugaggccguuaggccgaaauaacga

SEQ ID NO: 2513 - RNA, 36 nt, Artificial Sequence
  Description of Artificial Sequence:  Enzymatic Nucleic Acid Molecule
gucauuacugaugaggccguuaggccgaaagcgucu

SEQ ID NO: 2514 - RNA, 36 nt, Artificial Sequence
  Description of Artificial Sequence:  Enzymatic Nucleic Acid Molecule
ccgucaucugaugaggccguuaggccgaaagagcgu

SEQ ID NO: 2515 - RNA, 36 nt, Artificial Sequence
  Description of Artificial Sequence:  Enzymatic Nucleic Acid Molecule
cgagucacugaugaggccguuaggccgaaagucacc

SEQ ID NO: 2516 - RNA, 36 nt, Artificial Sequence
  Description of Artificial Sequence:  Enzymatic Nucleic Acid Molecule
ccgaguccugaugaggccguuaggccgaaaagucac

SEQ ID NO: 2517 - RNA, 36 nt, Artificial Sequence
  Description of Artificial Sequence:  Enzymatic Nucleic Acid Molecule
gaucacccugaugaggccguuaggccgaaagucaaa

SEQ ID NO: 2518 - RNA, 36 nt, Artificial Sequence
  Description of Artificial Sequence:  Enzymatic Nucleic Acid Molecule
ucugggucugaugaggccguuaggccgaaacacaug

SEQ ID NO: 2519 - RNA, 36 nt, Artificial Sequence
  Description of Artificial Sequence:  Enzymatic Nucleic Acid Molecule
ugaaauccugaugaggccguuaggccgaaacugucu

SEQ ID NO: 2520 - RNA, 36 nt, Artificial Sequence
  Description of Artificial Sequence:  Enzymatic Nucleic Acid Molecule
aagcugacugaugaggccguuaggccgaaaucgacu

SEQ ID NO: 2521 - RNA, 36 nt, Artificial Sequence
  Description of Artificial Sequence:  Enzymatic Nucleic Acid Molecule
caagcugcugaugaggccguuaggccgaaaaucgac

SEQ ID NO: 2522 - RNA, 36 nt, Artificial Sequence
  Description of Artificial Sequence:  Enzymatic Nucleic Acid Molecule
ccaagcucugaugaggccguuaggccgaaaaaucga

SEQ ID NO: 2523 - RNA, 36 nt, Artificial Sequence
  Description of Artificial Sequence:  Enzymatic Nucleic Acid Molecule
gggaucccugaugaggccguuaggccgaaagcugaa

SEQ ID NO: 2524 - RNA, 36 nt, Artificial Sequence
  Description of Artificial Sequence:  Enzymatic Nucleic Acid Molecule
aagguggcugaugaggccguuaggccgaaauccaag

SEQ ID NO: 2525 - RNA, 36 nt, Artificial Sequence
  Description of Artificial Sequence:  Enzymatic Nucleic Acid Molecule
aaugguacugaugaggccguuaggccgaaagguggg

SEQ ID NO: 2526 - RNA, 36 nt, Artificial Sequence
  Description of Artificial Sequence:  Enzymatic Nucleic Acid Molecule
caauggucugaugaggccguuaggccgaaaaggugg

SEQ ID NO: 2527 - RNA, 36 nt, Artificial Sequence
  Description of Artificial Sequence:  Enzymatic Nucleic Acid Molecule
ucaauggcugaugaggccguuaggccgaaaaaggug

SEQ ID NO: 2528 - RNA, 36 nt, Artificial Sequence
  Description of Artificial Sequence:  Enzymatic Nucleic Acid Molecule
ucgucuccugaugaggccguuaggccgaaaugguaa

SEQ ID NO: 2529 - RNA, 36 nt, Artificial Sequence
  Description of Artificial Sequence:  Enzymatic Nucleic Acid Molecule
ccucccccugaugaggccguuaggccgaaaccccug

SEQ ID NO: 2530 - RNA, 36 nt, Artificial Sequence
  Description of Artificial Sequence:  Enzymatic Nucleic Acid Molecule
accuguacugaugaggccguuaggccgaaaugccuc

SEQ ID NO: 2531 - RNA, 36 nt, Artificial Sequence
  Description of Artificial Sequence:  Enzymatic Nucleic Acid Molecule
aaaccugcugaugaggccguuaggccgaaagaugcc

SEQ ID NO: 2532 - RNA, 36 nt, Artificial Sequence
  Description of Artificial Sequence:  Enzymatic Nucleic Acid Molecule
agucacacugaugaggccguuaggccgaaaccugua

SEQ ID NO: 2533 - RNA, 36 nt, Artificial Sequence
  Description of Artificial Sequence:  Enzymatic Nucleic Acid Molecule
gagucaccugaugaggccguuaggccgaaaaccugu

SEQ ID NO: 2534 - RNA, 36 nt, Artificial Sequence
  Description of Artificial Sequence:  Enzymatic Nucleic Acid Molecule
ucucccgcugaugaggccguuaggccgaaagucaca

SEQ ID NO: 2535 - RNA, 36 nt, Artificial Sequence
  Description of Artificial Sequence:  Enzymatic Nucleic Acid Molecule
caugccccugaugaggccguuaggccgaaagggccg

SEQ ID NO: 2536 - RNA, 36 nt, Artificial Sequence
  Description of Artificial Sequence:  Enzymatic Nucleic Acid Molecule
agaaucgcugaugaggccguuaggccgaaacaugcc

SEQ ID NO: 2537 - RNA, 36 nt, Artificial Sequence
  Description of Artificial Sequence:  Enzymatic Nucleic Acid Molecule
aagaauccugaugaggccguuaggccgaaaacaugc

SEQ ID NO: 2538 - RNA, 36 nt, Artificial Sequence
  Description of Artificial Sequence:  Enzymatic Nucleic Acid Molecule
accgaagcugaugaggccguuaggccgaaaucgaac

SEQ ID NO: 2539 - RNA, 36 nt, Artificial Sequence
  Description of Artificial Sequence:  Enzymatic Nucleic Acid Molecule
gaccgaacugaugaggccguuaggccgaaaaucgaa

SEQ ID NO: 2540 - RNA, 36 nt, Artificial Sequence
  Description of Artificial Sequence:  Enzymatic Nucleic Acid Molecule
aggaccgcugaugaggccguuaggccgaaagaaucg

SEQ ID NO: 2541 - RNA, 36 nt, Artificial Sequence
  Description of Artificial Sequence:  Enzymatic Nucleic Acid Molecule
caggacccugaugaggccguuaggccgaaaagaauc

SEQ ID NO: 2542 - RNA, 36 nt, Artificial Sequence
  Description of Artificial Sequence:  Enzymatic Nucleic Acid Molecule
cacacagcugaugaggccguuaggccgaaaccgaag

SEQ ID NO: 2543 - RNA, 36 nt, Artificial Sequence
  Description of Artificial Sequence:  Enzymatic Nucleic Acid Molecule
cgcgucacugaugaggccguuaggccgaaagcacuc

SEQ ID NO: 2544 - RNA, 36 nt, Artificial Sequence
  Description of Artificial Sequence:  Enzymatic Nucleic Acid Molecule
uucccagcugaugaggccguuaggccgaaacuccag

SEQ ID NO: 2545 - RNA, 36 nt, Artificial Sequence
  Description of Artificial Sequence:  Enzymatic Nucleic Acid Molecule
uuucccacugaugaggccguuaggccgaaaacucca

SEQ ID NO: 2546 - RNA, 36 nt, Artificial Sequence
  Description of Artificial Sequence:  Enzymatic Nucleic Acid Molecule
cugugaacugaugaggccguuaggccgaaacgcuuu

SEQ ID NO: 2547 - RNA, 36 nt, Artificial Sequence
  Description of Artificial Sequence:  Enzymatic Nucleic Acid Molecule
gccugugcugaugaggccguuaggccgaaagacgcu

SEQ ID NO: 2548 - RNA, 36 nt, Artificial Sequence
  Description of Artificial Sequence:  Enzymatic Nucleic Acid Molecule
ggccugucugaugaggccguuaggccgaaaagacgc

SEQ ID NO: 2549 - RNA, 36 nt, Artificial Sequence
  Description of Artificial Sequence:  Enzymatic Nucleic Acid Molecule
ugugggucugaugaggccguuaggccgaaaggccug

SEQ ID NO: 2550 - RNA, 36 nt, Artificial Sequence
  Description of Artificial Sequence:  Enzymatic Nucleic Acid Molecule
gggcauccugaugaggccguuaggccgaaauguggg

SEQ ID NO: 2551 - RNA, 36 nt, Artificial Sequence
  Description of Artificial Sequence:  Enzymatic Nucleic Acid Molecule
ggacaggcugaugaggccguuaggccgaaagugggc

SEQ ID NO: 2552 - RNA, 36 nt, Artificial Sequence
  Description of Artificial Sequence:  Enzymatic Nucleic Acid Molecule
gggacagcugaugaggccguuaggccgaaaaguggg

SEQ ID NO: 2553 - RNA, 36 nt, Artificial Sequence
  Description of Artificial Sequence:  Enzymatic Nucleic Acid Molecule
gguuuggcugaugaggccguuaggccgaaacaggaa

SEQ ID NO: 2554 - RNA, 36 nt, Artificial Sequence
  Description of Artificial Sequence:  Enzymatic Nucleic Acid Molecule
guaagggcugaugaggccguuaggccgaaaguuguc

SEQ ID NO: 2555 - RNA, 36 nt, Artificial Sequence
  Description of Artificial Sequence:  Enzymatic Nucleic Acid Molecule
gguaaggcugaugaggccguuaggccgaaaaguugu

SEQ ID NO: 2556 - RNA, 36 nt, Artificial Sequence
  Description of Artificial Sequence:  Enzymatic Nucleic Acid Molecule
accaggucugaugaggccguuaggccgaaagggaag

SEQ ID NO: 2557 - RNA, 36 nt, Artificial Sequence
  Description of Artificial Sequence:  Enzymatic Nucleic Acid Molecule
uaccaggcugaugaggccguuaggccgaaaagggaa

SEQ ID NO: 2558 - RNA, 36 nt, Artificial Sequence
  Description of Artificial Sequence:  Enzymatic Nucleic Acid Molecule
ggaggugcugaugaggccguuaggccgaaagccuga

SEQ ID NO: 2559 - RNA, 36 nt, Artificial Sequence
  Description of Artificial Sequence:  Enzymatic Nucleic Acid Molecule
cacgaugcugaugaggccguuaggccgaaaggugga

SEQ ID NO: 2560 - RNA, 36 nt, Artificial Sequence
  Description of Artificial Sequence:  Enzymatic Nucleic Acid Molecule
aucccaccugaugaggccguuaggccgaaauggagg

SEQ ID NO: 2561 - RNA, 36 nt, Artificial Sequence
  Description of Artificial Sequence:  Enzymatic Nucleic Acid Molecule
cacauuucugaugaggccguuaggccgaaaucccac

SEQ ID NO: 2562 - RNA, 36 nt, Artificial Sequence
  Description of Artificial Sequence:  Enzymatic Nucleic Acid Molecule
cguaugacugaugaggccguuaggccgaaacacuuc

SEQ ID NO: 2563 - RNA, 36 nt, Artificial Sequence
  Description of Artificial Sequence:  Enzymatic Nucleic Acid Molecule
gccguaucugaugaggccguuaggccgaaagacacu

SEQ ID NO: 2564 - RNA, 36 nt, Artificial Sequence
  Description of Artificial Sequence:  Enzymatic Nucleic Acid Molecule
uaagccgcugaugaggccguuaggccgaaaugagac

SEQ ID NO: 2565 - RNA, 36 nt, Artificial Sequence
  Description of Artificial Sequence:  Enzymatic Nucleic Acid Molecule
uagguuucugaugaggccguuaggccgaaagccgua

SEQ ID NO: 2566 - RNA, 36 nt, Artificial Sequence
  Description of Artificial Sequence:  Enzymatic Nucleic Acid Molecule
guagguucugaugaggccguuaggccgaaaagccgu

SEQ ID NO: 2567 - RNA, 36 nt, Artificial Sequence
  Description of Artificial Sequence:  Enzymatic Nucleic Acid Molecule
ugcagcgcugaugaggccguuaggccgaaagguuua

SEQ ID NO: 2568 - RNA, 36 nt, Artificial Sequence
  Description of Artificial Sequence:  Enzymatic Nucleic Acid Molecule
cggcucccugaugaggccguuaggccgaaagccuau

SEQ ID NO: 2569 - RNA, 36 nt, Artificial Sequence
  Description of Artificial Sequence:  Enzymatic Nucleic Acid Molecule
cauuuugcugaugaggccguuaggccgaaacggcuc

SEQ ID NO: 2570 - RNA, 36 nt, Artificial Sequence
  Description of Artificial Sequence:  Enzymatic Nucleic Acid Molecule
ucauuuucugaugaggccguuaggccgaaaacggcu

SEQ ID NO: 2571 - RNA, 36 nt, Artificial Sequence
  Description of Artificial Sequence:  Enzymatic Nucleic Acid Molecule
ugagggucugaugaggccguuaggccgaaaucucau

SEQ ID NO: 2572 - RNA, 36 nt, Artificial Sequence
  Description of Artificial Sequence:  Enzymatic Nucleic Acid Molecule
gaugugucugaugaggccguuaggccgaaaggguga

SEQ ID NO: 2573 - RNA, 36 nt, Artificial Sequence
  Description of Artificial Sequence:  Enzymatic Nucleic Acid Molecule
guuauggcugaugaggccguuaggccgaaaugugug

SEQ ID NO: 2574 - RNA, 36 nt, Artificial Sequence
  Description of Artificial Sequence:  Enzymatic Nucleic Acid Molecule
auuuggucugaugaggccguuaggccgaaaugggau

SEQ ID NO: 2575 - RNA, 36 nt, Artificial Sequence
  Description of Artificial Sequence:  Enzymatic Nucleic Acid Molecule
caugaugcugaugaggccguuaggccgaaauuuggu

SEQ ID NO: 2576 - RNA, 36 nt, Artificial Sequence
  Description of Artificial Sequence:  Enzymatic Nucleic Acid Molecule
ccaugaucugaugaggccguuaggccgaaaauuugg

SEQ ID NO: 2577 - RNA, 36 nt, Artificial Sequence
  Description of Artificial Sequence:  Enzymatic Nucleic Acid Molecule
augccaucugaugaggccguuaggccgaaaugaauu

SEQ ID NO: 2578 - RNA, 36 nt, Artificial Sequence
  Description of Artificial Sequence:  Enzymatic Nucleic Acid Molecule
gucggcccugaugaggccguuaggccgaaacaugca

SEQ ID NO: 2579 - RNA, 36 nt, Artificial Sequence
  Description of Artificial Sequence:  Enzymatic Nucleic Acid Molecule
gcggccacugaugaggccguuaggccgaaagcugca

SEQ ID NO: 2580 - RNA, 36 nt, Artificial Sequence
  Description of Artificial Sequence:  Enzymatic Nucleic Acid Molecule
ccacaaucugaugaggccguuaggccgaaaccacac

SEQ ID NO: 2581 - RNA, 36 nt, Artificial Sequence
  Description of Artificial Sequence:  Enzymatic Nucleic Acid Molecule
uacccaccugaugaggccguuaggccgaaaugacca

SEQ ID NO: 2582 - RNA, 36 nt, Artificial Sequence
  Description of Artificial Sequence:  Enzymatic Nucleic Acid Molecule
augaucccugaugaggccguuaggccgaaacccaca

SEQ ID NO: 2583 - RNA, 36 nt, Artificial Sequence
  Description of Artificial Sequence:  Enzymatic Nucleic Acid Molecule
cggacaacugaugaggccguuaggccgaaaugaucc

SEQ ID NO: 2584 - RNA, 36 nt, Artificial Sequence
  Description of Artificial Sequence:  Enzymatic Nucleic Acid Molecule
ccggacacugaugaggccguuaggccgaaaaugauc

SEQ ID NO: 2585 - RNA, 36 nt, Artificial Sequence
  Description of Artificial Sequence:  Enzymatic Nucleic Acid Molecule
cccggaccugaugaggccguuaggccgaaaaaugau

SEQ ID NO: 2586 - RNA, 36 nt, Artificial Sequence
  Description of Artificial Sequence:  Enzymatic Nucleic Acid Molecule
ccucccgcugaugaggccguuaggccgaaacaaaau

SEQ ID NO: 2587 - RNA, 36 nt, Artificial Sequence
  Description of Artificial Sequence:  Enzymatic Nucleic Acid Molecule
gguagagcugaugaggccguuaggccgaaacuuccc

SEQ ID NO: 2588 - RNA, 36 nt, Artificial Sequence
  Description of Artificial Sequence:  Enzymatic Nucleic Acid Molecule
cccgguacugaugaggccguuaggccgaaaggacuu

SEQ ID NO: 2589 - RNA, 36 nt, Artificial Sequence
  Description of Artificial Sequence:  Enzymatic Nucleic Acid Molecule
cucccggcugaugaggccguuaggccgaaagaggac

SEQ ID NO: 2590 - RNA, 36 nt, Artificial Sequence
  Description of Artificial Sequence:  Enzymatic Nucleic Acid Molecule
uucaucgcugaugaggccguuaggccgaaacucccg

SEQ ID NO: 2591 - RNA, 36 nt, Artificial Sequence
  Description of Artificial Sequence:  Enzymatic Nucleic Acid Molecule
uuucauccugaugaggccguuaggccgaaaacuccc

SEQ ID NO: 2592 - RNA, 36 nt, Artificial Sequence
  Description of Artificial Sequence:  Enzymatic Nucleic Acid Molecule
gaggugucugaugaggccguuaggccgaaaggcgca

SEQ ID NO: 2593 - RNA, 36 nt, Artificial Sequence
  Description of Artificial Sequence:  Enzymatic Nucleic Acid Molecule
uguaaggcugaugaggccguuaggccgaaaggugug

SEQ ID NO: 2594 - RNA, 36 nt, Artificial Sequence
  Description of Artificial Sequence:  Enzymatic Nucleic Acid Molecule
ucgaugucugaugaggccguuaggccgaaagggagg

SEQ ID NO: 2595 - RNA, 36 nt, Artificial Sequence
  Description of Artificial Sequence:  Enzymatic Nucleic Acid Molecule
uucgaugcugaugaggccguuaggccgaaaagggag

SEQ ID NO: 2596 - RNA, 36 nt, Artificial Sequence
  Description of Artificial Sequence:  Enzymatic Nucleic Acid Molecule
ccuguuccugaugaggccguuaggccgaaauguaag

SEQ ID NO: 2597 - RNA, 36 nt, Artificial Sequence
  Description of Artificial Sequence:  Enzymatic Nucleic Acid Molecule
gcucggccugaugaggccguuaggccgaaagcugca

SEQ ID NO: 2598 - RNA, 36 nt, Artificial Sequence
  Description of Artificial Sequence:  Enzymatic Nucleic Acid Molecule
gcaaccccugaugaggccguuaggccgaaagugccu

SEQ ID NO: 2599 - RNA, 36 nt, Artificial Sequence
  Description of Artificial Sequence:  Enzymatic Nucleic Acid Molecule
uugcagccugaugaggccguuaggccgaaacccgag

SEQ ID NO: 2600 - RNA, 36 nt, Artificial Sequence
  Description of Artificial Sequence:  Enzymatic Nucleic Acid Molecule
gcugaugcugaugaggccguuaggccgaaaguucca

SEQ ID NO: 2601 - RNA, 36 nt, Artificial Sequence
  Description of Artificial Sequence:  Enzymatic Nucleic Acid Molecule
cgcugaucugaugaggccguuaggccgaaaaguucc

SEQ ID NO: 2602 - RNA, 36 nt, Artificial Sequence
  Description of Artificial Sequence:  Enzymatic Nucleic Acid Molecule
ucccgcucugaugaggccguuaggccgaaaugaagu

SEQ ID NO: 2603 - RNA, 36 nt, Artificial Sequence
  Description of Artificial Sequence:  Enzymatic Nucleic Acid Molecule
aauacugcugaugaggccguuaggccgaaaucccgc

SEQ ID NO: 2604 - RNA, 36 nt, Artificial Sequence
  Description of Artificial Sequence:  Enzymatic Nucleic Acid Molecule
ugcuaaacugaugaggccguuaggccgaaacuguau

SEQ ID NO: 2605 - RNA, 36 nt, Artificial Sequence
  Description of Artificial Sequence:  Enzymatic Nucleic Acid Molecule
ccugcuacugaugaggccguuaggccgaaauacugu

SEQ ID NO: 2606 - RNA, 36 nt, Artificial Sequence
  Description of Artificial Sequence:  Enzymatic Nucleic Acid Molecule
gccugcucugaugaggccguuaggccgaaaauacug

SEQ ID NO: 2607 - RNA, 36 nt, Artificial Sequence
  Description of Artificial Sequence:  Enzymatic Nucleic Acid Molecule
agccugccugaugaggccguuaggccgaaaaauacu

SEQ ID NO: 2608 - RNA, 36 nt, Artificial Sequence
  Description of Artificial Sequence:  Enzymatic Nucleic Acid Molecule
cagagugcugaugaggccguuaggccgaaauaagcc

SEQ ID NO: 2609 - RNA, 36 nt, Artificial Sequence
  Description of Artificial Sequence:  Enzymatic Nucleic Acid Molecule
ccaggcacugaugaggccguuaggccgaaaguggau

SEQ ID NO: 2610 - RNA, 36 nt, Artificial Sequence
  Description of Artificial Sequence:  Enzymatic Nucleic Acid Molecule
gugaugccugaugaggccguuaggccgaaaucgcgg

SEQ ID NO: 2611 - RNA, 36 nt, Artificial Sequence
  Description of Artificial Sequence:  Enzymatic Nucleic Acid Molecule
caucagucugaugaggccguuaggccgaaaugcuau

SEQ ID NO: 2612 - RNA, 36 nt, Artificial Sequence
  Description of Artificial Sequence:  Enzymatic Nucleic Acid Molecule
ggcugugcugaugaggccguuaggccgaaaugccau

SEQ ID NO: 2613 - RNA, 36 nt, Artificial Sequence
  Description of Artificial Sequence:  Enzymatic Nucleic Acid Molecule
aggcugucugaugaggccguuaggccgaaaaugcca

SEQ ID NO: 2614 - RNA, 36 nt, Artificial Sequence
  Description of Artificial Sequence:  Enzymatic Nucleic Acid Molecule
ggugauacugaugaggccguuaggccgaaaggcugu

SEQ ID NO: 2615 - RNA, 36 nt, Artificial Sequence
  Description of Artificial Sequence:  Enzymatic Nucleic Acid Molecule
cuggugacugaugaggccguuaggccgaaagaggcu

SEQ ID NO: 2616 - RNA, 36 nt, Artificial Sequence
  Description of Artificial Sequence:  Enzymatic Nucleic Acid Molecule
gacuggucugaugaggccguuaggccgaaauagagg

SEQ ID NO: 2617 - RNA, 36 nt, Artificial Sequence
  Description of Artificial Sequence:  Enzymatic Nucleic Acid Molecule
gugagcgcugaugaggccguuaggccgaaacuggug

SEQ ID NO: 2618 - RNA, 36 nt, Artificial Sequence
  Description of Artificial Sequence:  Enzymatic Nucleic Acid Molecule
ggguggucugaugaggccguuaggccgaaagcggac

SEQ ID NO: 2619 - RNA, 36 nt, Artificial Sequence
  Description of Artificial Sequence:  Enzymatic Nucleic Acid Molecule
aggagggcugaugaggccguuaggccgaaauucugg

SEQ ID NO: 2620 - RNA, 36 nt, Artificial Sequence
  Description of Artificial Sequence:  Enzymatic Nucleic Acid Molecule
ugaacagcugaugaggccguuaggccgaaaggguau

SEQ ID NO: 2621 - RNA, 36 nt, Artificial Sequence
  Description of Artificial Sequence:  Enzymatic Nucleic Acid Molecule
ccccuaacugaugaggccguuaggccgaaauguuga

SEQ ID NO: 2622 - RNA, 36 nt, Artificial Sequence
  Description of Artificial Sequence:  Enzymatic Nucleic Acid Molecule
ucccccucugaugaggccguuaggccgaaagauguu

SEQ ID NO: 2623 - RNA, 36 nt, Artificial Sequence
  Description of Artificial Sequence:  Enzymatic Nucleic Acid Molecule
auccccccugaugaggccguuaggccgaaaagaugu

SEQ ID NO: 2624 - RNA, 36 nt, Artificial Sequence
  Description of Artificial Sequence:  Enzymatic Nucleic Acid Molecule
gcgaguucugaugaggccguuaggccgaaagcagcc

SEQ ID NO: 2625 - RNA, 36 nt, Artificial Sequence
  Description of Artificial Sequence:  Enzymatic Nucleic Acid Molecule
gcacuggcugaugaggccguuaggccgaaaggagcg

SEQ ID NO: 2626 - RNA, 36 nt, Artificial Sequence
  Description of Artificial Sequence:  Enzymatic Nucleic Acid Molecule
aaggccgcugaugaggccguuaggccgaaagcagca

SEQ ID NO: 2627 - RNA, 36 nt, Artificial Sequence
  Description of Artificial Sequence:  Enzymatic Nucleic Acid Molecule
uguccaccugaugaggccguuaggccgaaagcaccu

SEQ ID NO: 2628 - RNA, 36 nt, Artificial Sequence
  Description of Artificial Sequence:  Enzymatic Nucleic Acid Molecule
ccgccagcugaugaggccguuaggccgaaaugucca

SEQ ID NO: 2629 - RNA, 36 nt, Artificial Sequence
  Description of Artificial Sequence:  Enzymatic Nucleic Acid Molecule
cccgccacugaugaggccguuaggccgaaaaugucc

SEQ ID NO: 2630 - RNA, 36 nt, Artificial Sequence
  Description of Artificial Sequence:  Enzymatic Nucleic Acid Molecule
agggagccugaugaggccguuaggccgaaaguuaac

SEQ ID NO: 2631 - RNA, 36 nt, Artificial Sequence
  Description of Artificial Sequence:  Enzymatic Nucleic Acid Molecule
gggagagcugaugaggccguuaggccgaaauggcag

SEQ ID NO: 2632 - RNA, 36 nt, Artificial Sequence
  Description of Artificial Sequence:  Enzymatic Nucleic Acid Molecule
cgggggacugaugaggccguuaggccgaaaggaugg

SEQ ID NO: 2633 - RNA, 36 nt, Artificial Sequence
  Description of Artificial Sequence:  Enzymatic Nucleic Acid Molecule
cgaacgccugaugaggccguuaggccgaaaucagcc

SEQ ID NO: 2634 - RNA, 36 nt, Artificial Sequence
  Description of Artificial Sequence:  Enzymatic Nucleic Acid Molecule
accccgccugaugaggccguuaggccgaaaagcgaa

SEQ ID NO: 2635 - RNA, 36 nt, Artificial Sequence
  Description of Artificial Sequence:  Enzymatic Nucleic Acid Molecule
acguggucugaugaggccguuaggccgaaaccccgc

SEQ ID NO: 2636 - RNA, 36 nt, Artificial Sequence
  Description of Artificial Sequence:  Enzymatic Nucleic Acid Molecule
ugggggacugaugaggccguuaggccgaaacguggu

SEQ ID NO: 2637 - RNA, 36 nt, Artificial Sequence
  Description of Artificial Sequence:  Enzymatic Nucleic Acid Molecule
gugggggcugaugaggccguuaggccgaaaacgugg

SEQ ID NO: 2638 - RNA, 36 nt, Artificial Sequence
  Description of Artificial Sequence:  Enzymatic Nucleic Acid Molecule
cguggggcugaugaggccguuaggccgaaaaacgug

SEQ ID NO: 2639 - RNA, 36 nt, Artificial Sequence
  Description of Artificial Sequence:  Enzymatic Nucleic Acid Molecule
aggcacgcugaugaggccguuaggccgaaagugcgu

SEQ ID NO: 2640 - RNA, 36 nt, Artificial Sequence
  Description of Artificial Sequence:  Enzymatic Nucleic Acid Molecule
ucugagucugaugaggccguuaggccgaaacacgug

SEQ ID NO: 2641 - RNA, 36 nt, Artificial Sequence
  Description of Artificial Sequence:  Enzymatic Nucleic Acid Molecule
aggaucucugaugaggccguuaggccgaaaguuaca

SEQ ID NO: 2642 - RNA, 36 nt, Artificial Sequence
  Description of Artificial Sequence:  Enzymatic Nucleic Acid Molecule
uggagagcugaugaggccguuaggccgaaaucugag

SEQ ID NO: 2643 - RNA, 36 nt, Artificial Sequence
  Description of Artificial Sequence:  Enzymatic Nucleic Acid Molecule
ggcuggacugaugaggccguuaggccgaaaggaucu

SEQ ID NO: 2644 - RNA, 36 nt, Artificial Sequence
  Description of Artificial Sequence:  Enzymatic Nucleic Acid Molecule
gaggcugcugaugaggccguuaggccgaaagaggau

SEQ ID NO: 2645 - RNA, 36 nt, Artificial Sequence
  Description of Artificial Sequence:  Enzymatic Nucleic Acid Molecule
ugauggucugaugaggccguuaggccgaaaggcugg

SEQ ID NO: 2646 - RNA, 36 nt, Artificial Sequence
  Description of Artificial Sequence:  Enzymatic Nucleic Acid Molecule
gcugagucugaugaggccguuaggccgaaaugguga

SEQ ID NO: 2647 - RNA, 36 nt, Artificial Sequence
  Description of Artificial Sequence:  Enzymatic Nucleic Acid Molecule
agcagcucugaugaggccguuaggccgaaagugaug

SEQ ID NO: 2648 - RNA, 36 nt, Artificial Sequence
  Description of Artificial Sequence:  Enzymatic Nucleic Acid Molecule
acuggugcugaugaggccguuaggccgaaagccucu

SEQ ID NO: 2649 - RNA, 36 nt, Artificial Sequence
  Description of Artificial Sequence:  Enzymatic Nucleic Acid Molecule
cacuggucugaugaggccguuaggccgaaaagccuc

SEQ ID NO: 2650 - RNA, 36 nt, Artificial Sequence
  Description of Artificial Sequence:  Enzymatic Nucleic Acid Molecule
ccucauucugaugaggccguuaggccgaaauccacu

SEQ ID NO: 2651 - RNA, 36 nt, Artificial Sequence
  Description of Artificial Sequence:  Enzymatic Nucleic Acid Molecule
uccucaucugaugaggccguuaggccgaaaauccac

SEQ ID NO: 2652 - RNA, 36 nt, Artificial Sequence
  Description of Artificial Sequence:  Enzymatic Nucleic Acid Molecule
uggcgugcugaugaggccguuaggccgaaagcaguc

SEQ ID NO: 2653 - RNA, 36 nt, Artificial Sequence
  Description of Artificial Sequence:  Enzymatic Nucleic Acid Molecule
cgagccgcugaugaggccguuaggccgaaagcaugg

SEQ ID NO: 2654 - RNA, 36 nt, Artificial Sequence
  Description of Artificial Sequence:  Enzymatic Nucleic Acid Molecule
uagccaccugaugaggccguuaggccgaaagccgga

SEQ ID NO: 2655 - RNA, 36 nt, Artificial Sequence
  Description of Artificial Sequence:  Enzymatic Nucleic Acid Molecule
cauccuucugaugaggccguuaggccgaaagccacg

SEQ ID NO: 2656 - RNA, 36 nt, Artificial Sequence
  Description of Artificial Sequence:  Enzymatic Nucleic Acid Molecule
agucccacugaugaggccguuaggccgaaacauccu

SEQ ID NO: 2657 - RNA, 36 nt, Artificial Sequence
  Description of Artificial Sequence:  Enzymatic Nucleic Acid Molecule
caguccccugaugaggccguuaggccgaaaacaucc

SEQ ID NO: 2658 - RNA, 36 nt, Artificial Sequence
  Description of Artificial Sequence:  Enzymatic Nucleic Acid Molecule
ccgugcacugaugaggccguuaggccgaaauccagu

SEQ ID NO: 2659 - RNA, 36 nt, Artificial Sequence
  Description of Artificial Sequence:  Enzymatic Nucleic Acid Molecule
gucaguccugaugaggccguuaggccgaaacaccgu

SEQ ID NO: 2660 - RNA, 36 nt, Artificial Sequence
  Description of Artificial Sequence:  Enzymatic Nucleic Acid Molecule
ggucuugcugaugaggccguuaggccgaaagucagu

SEQ ID NO: 2661 - RNA, 36 nt, Artificial Sequence
  Description of Artificial Sequence:  Enzymatic Nucleic Acid Molecule
aggucuucugaugaggccguuaggccgaaaagucag

SEQ ID NO: 2662 - RNA, 36 nt, Artificial Sequence
  Description of Artificial Sequence:  Enzymatic Nucleic Acid Molecule
uggacugcugaugaggccguuaggccgaaagccagg

SEQ ID NO: 2663 - RNA, 36 nt, Artificial Sequence
  Description of Artificial Sequence:  Enzymatic Nucleic Acid Molecule
gagcuugcugaugaggccguuaggccgaaacuggag

SEQ ID NO: 2664 - RNA, 36 nt, Artificial Sequence
  Description of Artificial Sequence:  Enzymatic Nucleic Acid Molecule
ucggcagcugaugaggccguuaggccgaaagcuugg

SEQ ID NO: 2665 - RNA, 36 nt, Artificial Sequence
  Description of Artificial Sequence:  Enzymatic Nucleic Acid Molecule
ucccggccugaugaggccguuaggccgaaauuucgg

SEQ ID NO: 2666 - RNA, 36 nt, Artificial Sequence
  Description of Artificial Sequence:  Enzymatic Nucleic Acid Molecule
agaaaggcugaugaggccguuaggccgaaacucccg

SEQ ID NO: 2667 - RNA, 36 nt, Artificial Sequence
  Description of Artificial Sequence:  Enzymatic Nucleic Acid Molecule
gagaagacugaugaggccguuaggccgaaagggacu

SEQ ID NO: 2668 - RNA, 36 nt, Artificial Sequence
  Description of Artificial Sequence:  Enzymatic Nucleic Acid Molecule
ugagaagcugaugaggccguuaggccgaaaagggac

SEQ ID NO: 2669 - RNA, 36 nt, Artificial Sequence
  Description of Artificial Sequence:  Enzymatic Nucleic Acid Molecule
augagaacugaugaggccguuaggccgaaaaaggga

SEQ ID NO: 2670 - RNA, 36 nt, Artificial Sequence
  Description of Artificial Sequence:  Enzymatic Nucleic Acid Molecule
gcaugagcugaugaggccguuaggccgaaagaaagg

SEQ ID NO: 2671 - RNA, 36 nt, Artificial Sequence
  Description of Artificial Sequence:  Enzymatic Nucleic Acid Molecule
ggcaugacugaugaggccguuaggccgaaaagaaag

SEQ ID NO: 2672 - RNA, 36 nt, Artificial Sequence
  Description of Artificial Sequence:  Enzymatic Nucleic Acid Molecule
uuggcaucugaugaggccguuaggccgaaagaagaa

SEQ ID NO: 2673 - RNA, 36 nt, Artificial Sequence
  Description of Artificial Sequence:  Enzymatic Nucleic Acid Molecule
ucccuugcugaugaggccguuaggccgaaacccgcg

SEQ ID NO: 2674 - RNA, 36 nt, Artificial Sequence
  Description of Artificial Sequence:  Enzymatic Nucleic Acid Molecule
cccgccacugaugaggccguuaggccgaaacucccu

SEQ ID NO: 2675 - RNA, 36 nt, Artificial Sequence
  Description of Artificial Sequence:  Enzymatic Nucleic Acid Molecule
guccggucugaugaggccguuaggccgaaauuugug

SEQ ID NO: 2676 - RNA, 36 nt, Artificial Sequence
  Description of Artificial Sequence:  Enzymatic Nucleic Acid Molecule
uguccggcugaugaggccguuaggccgaaaauuugu

SEQ ID NO: 2677 - RNA, 36 nt, Artificial Sequence
  Description of Artificial Sequence:  Enzymatic Nucleic Acid Molecule
cguuuuucugaugaggccguuaggccgaaacauguc

SEQ ID NO: 2678 - RNA, 36 nt, Artificial Sequence
  Description of Artificial Sequence:  Enzymatic Nucleic Acid Molecule
cucauggcugaugaggccguuaggccgaaaccguuu

SEQ ID NO: 2679 - RNA, 36 nt, Artificial Sequence
  Description of Artificial Sequence:  Enzymatic Nucleic Acid Molecule
ccucaugcugaugaggccguuaggccgaaaaccguu

SEQ ID NO: 2680 - RNA, 36 nt, Artificial Sequence
  Description of Artificial Sequence:  Enzymatic Nucleic Acid Molecule
gcccaaccugaugaggccguuaggccgaaauccuca

SEQ ID NO: 2681 - RNA, 36 nt, Artificial Sequence
  Description of Artificial Sequence:  Enzymatic Nucleic Acid Molecule
uaggccccugaugaggccguuaggccgaaacgaucc

SEQ ID NO: 2682 - RNA, 36 nt, Artificial Sequence
  Description of Artificial Sequence:  Enzymatic Nucleic Acid Molecule
cagguuucugaugaggccguuaggccgaaaggccca

SEQ ID NO: 2683 - RNA, 36 nt, Artificial Sequence
  Description of Artificial Sequence:  Enzymatic Nucleic Acid Molecule
gauggggcugaugaggccguuaggccgaaacguucc

SEQ ID NO: 2684 - RNA, 36 nt, Artificial Sequence
  Description of Artificial Sequence:  Enzymatic Nucleic Acid Molecule
ugaugggcugaugaggccguuaggccgaaaacguuc

SEQ ID NO: 2685 - RNA, 36 nt, Artificial Sequence
  Description of Artificial Sequence:  Enzymatic Nucleic Acid Molecule
acgcguucugaugaggccguuaggccgaaaugggga

SEQ ID NO: 2686 - RNA, 36 nt, Artificial Sequence
  Description of Artificial Sequence:  Enzymatic Nucleic Acid Molecule
uguggugcugaugaggccguuaggccgaaacgcguu

SEQ ID NO: 2687 - RNA, 36 nt, Artificial Sequence
  Description of Artificial Sequence:  Enzymatic Nucleic Acid Molecule
cgccgggcugaugaggccguuaggccgaaagggugu

SEQ ID NO: 2688 - RNA, 36 nt, Artificial Sequence
  Description of Artificial Sequence:  Enzymatic Nucleic Acid Molecule
cuccacgcugaugaggccguuaggccgaaacucuuc

SEQ ID NO: 2689 - RNA, 36 nt, Artificial Sequence
  Description of Artificial Sequence:  Enzymatic Nucleic Acid Molecule
cccgcgucugaugaggccguuaggccgaaaucucca

SEQ ID NO: 2690 - RNA, 36 nt, Artificial Sequence
  Description of Artificial Sequence:  Enzymatic Nucleic Acid Molecule
acccgcgcugaugaggccguuaggccgaaaaucucc

SEQ ID NO: 2691 - RNA, 36 nt, Artificial Sequence
  Description of Artificial Sequence:  Enzymatic Nucleic Acid Molecule
guggucacugaugaggccguuaggccgaaacccguc

SEQ ID NO: 2692 - RNA, 36 nt, Artificial Sequence
  Description of Artificial Sequence:  Enzymatic Nucleic Acid Molecule
gggccggcugaugaggccguuaggccgaaaccuggc

SEQ ID NO: 2693 - RNA, 36 nt, Artificial Sequence
  Description of Artificial Sequence:  Enzymatic Nucleic Acid Molecule
gaccuggcugaugaggccguuaggccgaaaugugac

SEQ ID NO: 2694 - RNA, 36 nt, Artificial Sequence
  Description of Artificial Sequence:  Enzymatic Nucleic Acid Molecule
uggaagucugaugaggccguuaggccgaaagcacug

SEQ ID NO: 2695 - RNA, 36 nt, Artificial Sequence
  Description of Artificial Sequence:  Enzymatic Nucleic Acid Molecule
agcauggcugaugaggccguuaggccgaaagugagc

SEQ ID NO: 2696 - RNA, 36 nt, Artificial Sequence
  Description of Artificial Sequence:  Enzymatic Nucleic Acid Molecule
gagcaugcugaugaggccguuaggccgaaaagugag

SEQ ID NO: 2697 - RNA, 36 nt, Artificial Sequence
  Description of Artificial Sequence:  Enzymatic Nucleic Acid Molecule
ggucggucugaugaggccguuaggccgaaagcaugg

SEQ ID NO: 2698 - RNA, 36 nt, Artificial Sequence
  Description of Artificial Sequence:  Enzymatic Nucleic Acid Molecule
aauguggcugaugaggccguuaggccgaaagggguc

SEQ ID NO: 2699 - RNA, 36 nt, Artificial Sequence
  Description of Artificial Sequence:  Enzymatic Nucleic Acid Molecule
cugcugucugaugaggccguuaggccgaaauguggg

SEQ ID NO: 2700 - RNA, 36 nt, Artificial Sequence
  Description of Artificial Sequence:  Enzymatic Nucleic Acid Molecule
ucugcugcugaugaggccguuaggccgaaaaugugg

SEQ ID NO: 2701 - RNA, 36 nt, Artificial Sequence
  Description of Artificial Sequence:  Enzymatic Nucleic Acid Molecule
cuacguucugaugaggccguuaggccgaaagccguc

SEQ ID NO: 2702 - RNA, 36 nt, Artificial Sequence
  Description of Artificial Sequence:  Enzymatic Nucleic Acid Molecule
cuagcugcugaugaggccguuaggccgaaagagcug

SEQ ID NO: 2703 - RNA, 36 nt, Artificial Sequence
  Description of Artificial Sequence:  Enzymatic Nucleic Acid Molecule
gcuagcucugaugaggccguuaggccgaaaagagcu

SEQ ID NO: 2704 - RNA, 36 nt, Artificial Sequence
  Description of Artificial Sequence:  Enzymatic Nucleic Acid Molecule
aauuggccugaugaggccguuaggccgaaagcugaa

SEQ ID NO: 2705 - RNA, 36 nt, Artificial Sequence
  Description of Artificial Sequence:  Enzymatic Nucleic Acid Molecule
uucaaggcugaugaggccguuaggccgaaaggcgca

SEQ ID NO: 2706 - RNA, 36 nt, Artificial Sequence
  Description of Artificial Sequence:  Enzymatic Nucleic Acid Molecule
cuucaagcugaugaggccguuaggccgaaaaggcgc

SEQ ID NO: 2707 - RNA, 36 nt, Artificial Sequence
  Description of Artificial Sequence:  Enzymatic Nucleic Acid Molecule
ugccuuccugaugaggccguuaggccgaaaggaagg

SEQ ID NO: 2708 - RNA, 36 nt, Artificial Sequence
  Description of Artificial Sequence:  Enzymatic Nucleic Acid Molecule
uggugggcugaugaggccguuaggccgaaagugcau

SEQ ID NO: 2709 - RNA, 36 nt, Artificial Sequence
  Description of Artificial Sequence:  Enzymatic Nucleic Acid Molecule
guccgggcugaugaggccguuaggccgaaagucaug

SEQ ID NO: 2710 - RNA, 36 nt, Artificial Sequence
  Description of Artificial Sequence:  Enzymatic Nucleic Acid Molecule
ccucgaucugaugaggccguuaggccgaaaggucag

SEQ ID NO: 2711 - RNA, 36 nt, Artificial Sequence
  Description of Artificial Sequence:  Enzymatic Nucleic Acid Molecule
uggccuccugaugaggccguuaggccgaaaugaggu

SEQ ID NO: 2712 - RNA, 36 nt, Artificial Sequence
  Description of Artificial Sequence:  Enzymatic Nucleic Acid Molecule
cacgggucugaugaggccguuaggccgaaauguuuc

SEQ ID NO: 2713 - RNA, 36 nt, Artificial Sequence
  Description of Artificial Sequence:  Enzymatic Nucleic Acid Molecule
auucucucugaugaggccguuaggccgaaacuccac

SEQ ID NO: 2714 - RNA, 36 nt, Artificial Sequence
  Description of Artificial Sequence:  Enzymatic Nucleic Acid Molecule
accaccucugaugaggccguuaggccgaaauucucu

SEQ ID NO: 2715 - RNA, 36 nt, Artificial Sequence
  Description of Artificial Sequence:  Enzymatic Nucleic Acid Molecule
ccaaaaucugaugaggccguuaggccgaaaccaccu

SEQ ID NO: 2716 - RNA, 36 nt, Artificial Sequence
  Description of Artificial Sequence:  Enzymatic Nucleic Acid Molecule
aguccaacugaugaggccguuaggccgaaauuacca

SEQ ID NO: 2717 - RNA, 36 nt, Artificial Sequence
  Description of Artificial Sequence:  Enzymatic Nucleic Acid Molecule
gaguccacugaugaggccguuaggccgaaaauuacc

SEQ ID NO: 2718 - RNA, 36 nt, Artificial Sequence
  Description of Artificial Sequence:  Enzymatic Nucleic Acid Molecule
agagucccugaugaggccguuaggccgaaaaauuac

SEQ ID NO: 2719 - RNA, 36 nt, Artificial Sequence
  Description of Artificial Sequence:  Enzymatic Nucleic Acid Molecule
gucgaaacugaugaggccguuaggccgaaaguccaa

SEQ ID NO: 2720 - RNA, 36 nt, Artificial Sequence
  Description of Artificial Sequence:  Enzymatic Nucleic Acid Molecule
gggucgacugaugaggccguuaggccgaaagagucc

SEQ ID NO: 2721 - RNA, 36 nt, Artificial Sequence
  Description of Artificial Sequence:  Enzymatic Nucleic Acid Molecule
cgggucgcugaugaggccguuaggccgaaaagaguc

SEQ ID NO: 2722 - RNA, 36 nt, Artificial Sequence
  Description of Artificial Sequence:  Enzymatic Nucleic Acid Molecule
gcggguccugaugaggccguuaggccgaaaaagagu

SEQ ID NO: 2723 - RNA, 36 nt, Artificial Sequence
  Description of Artificial Sequence:  Enzymatic Nucleic Acid Molecule
ugcaacgcugaugaggccguuaggccgaaauacuuc

SEQ ID NO: 2724 - RNA, 36 nt, Artificial Sequence
  Description of Artificial Sequence:  Enzymatic Nucleic Acid Molecule
cugcugccugaugaggccguuaggccgaaacggaua

SEQ ID NO: 2725 - RNA, 36 nt, Artificial Sequence
  Description of Artificial Sequence:  Enzymatic Nucleic Acid Molecule
uucgcagcugaugaggccguuaggccgaaaucucug

SEQ ID NO: 2726 - RNA, 36 nt, Artificial Sequence
  Description of Artificial Sequence:  Enzymatic Nucleic Acid Molecule
cuucuugcugaugaggccguuaggccgaaauuuucg

SEQ ID NO: 2727 - RNA, 36 nt, Artificial Sequence
  Description of Artificial Sequence:  Enzymatic Nucleic Acid Molecule
gggggggcugaugaggccguuaggccgaaacuucuu

SEQ ID NO: 2728 - RNA, 36 nt, Artificial Sequence
  Description of Artificial Sequence:  Enzymatic Nucleic Acid Molecule
cggggggcugaugaggccguuaggccgaaaacuucu

SEQ ID NO: 2729 - RNA, 36 nt, Artificial Sequence
  Description of Artificial Sequence:  Enzymatic Nucleic Acid Molecule
aacagugcugaugaggccguuaggccgaaaggguug

SEQ ID NO: 2730 - RNA, 36 nt, Artificial Sequence
  Description of Artificial Sequence:  Enzymatic Nucleic Acid Molecule
uuuccagcugaugaggccguuaggccgaaacucuaa

SEQ ID NO: 2731 - RNA, 36 nt, Artificial Sequence
  Description of Artificial Sequence:  Enzymatic Nucleic Acid Molecule
gguauugcugaugaggccguuaggccgaaagggccc

SEQ ID NO: 2732 - RNA, 36 nt, Artificial Sequence
  Description of Artificial Sequence:  Enzymatic Nucleic Acid Molecule
gaggcggcugaugaggccguuaggccgaaauuggag

SEQ ID NO: 2733 - RNA, 36 nt, Artificial Sequence
  Description of Artificial Sequence:  Enzymatic Nucleic Acid Molecule
uuccgugcugaugaggccguuaggccgaaaggcggu

SEQ ID NO: 2734 - RNA, 36 nt, Artificial Sequence
  Description of Artificial Sequence:  Enzymatic Nucleic Acid Molecule
ucagaaccugaugaggccguuaggccgaaaccgucc

SEQ ID NO: 2735 - RNA, 36 nt, Artificial Sequence
  Description of Artificial Sequence:  Enzymatic Nucleic Acid Molecule
cugucagcugaugaggccguuaggccgaaacaaccg

SEQ ID NO: 2736 - RNA, 36 nt, Artificial Sequence
  Description of Artificial Sequence:  Enzymatic Nucleic Acid Molecule
ucugucacugaugaggccguuaggccgaaaacaacc

SEQ ID NO: 2737 - RNA, 36 nt, Artificial Sequence
  Description of Artificial Sequence:  Enzymatic Nucleic Acid Molecule
ggcagaacugaugaggccguuaggccgaaacacggu

SEQ ID NO: 2738 - RNA, 36 nt, Artificial Sequence
  Description of Artificial Sequence:  Enzymatic Nucleic Acid Molecule
aaggcagcugaugaggccguuaggccgaaagacacg

SEQ ID NO: 2739 - RNA, 36 nt, Artificial Sequence
  Description of Artificial Sequence:  Enzymatic Nucleic Acid Molecule
caaggcacugaugaggccguuaggccgaaaagacac

SEQ ID NO: 2740 - RNA, 36 nt, Artificial Sequence
  Description of Artificial Sequence:  Enzymatic Nucleic Acid Molecule
cuccgcccugaugaggccguuaggccgaaaggcaga

SEQ ID NO: 2741 - RNA, 36 nt, Artificial Sequence
  Description of Artificial Sequence:  Enzymatic Nucleic Acid Molecule
cgauccgcugaugaggccguuaggccgaaagcugcc

SEQ ID NO: 2742 - RNA, 36 nt, Artificial Sequence
  Description of Artificial Sequence:  Enzymatic Nucleic Acid Molecule
ugaucggcugaugaggccguuaggccgaaaggggcg

SEQ ID NO: 2743 - RNA, 36 nt, Artificial Sequence
  Description of Artificial Sequence:  Enzymatic Nucleic Acid Molecule
gaggucucugaugaggccguuaggccgaaaucggga

SEQ ID NO: 2744 - RNA, 36 nt, Artificial Sequence
  Description of Artificial Sequence:  Enzymatic Nucleic Acid Molecule
gucgucacugaugaggccguuaggccgaaaggucug

SEQ ID NO: 2745 - RNA, 36 nt, Artificial Sequence
  Description of Artificial Sequence:  Enzymatic Nucleic Acid Molecule
aacgucacugaugaggccguuaggccgaaauucuuu

SEQ ID NO: 2746 - RNA, 36 nt, Artificial Sequence
  Description of Artificial Sequence:  Enzymatic Nucleic Acid Molecule
acgacuccugaugaggccguuaggccgaaacgucag

SEQ ID NO: 2747 - RNA, 36 nt, Artificial Sequence
  Description of Artificial Sequence:  Enzymatic Nucleic Acid Molecule
ggaguaccugaugaggccguuaggccgaaacucaac

SEQ ID NO: 2748 - RNA, 36 nt, Artificial Sequence
  Description of Artificial Sequence:  Enzymatic Nucleic Acid Molecule
ggaggagcugaugaggccguuaggccgaaacgacuc

SEQ ID NO: 2749 - RNA, 36 nt, Artificial Sequence
  Description of Artificial Sequence:  Enzymatic Nucleic Acid Molecule
ccaugugcugaugaggccguuaggccgaaaggacau

SEQ ID NO: 2750 - RNA, 36 nt, Artificial Sequence
  Description of Artificial Sequence:  Enzymatic Nucleic Acid Molecule
auggcgucugaugaggccguuaggccgaaaucaggg

SEQ ID NO: 2751 - RNA, 36 nt, Artificial Sequence
  Description of Artificial Sequence:  Enzymatic Nucleic Acid Molecule
guugcuccugaugaggccguuaggccgaaacgcguu

SEQ ID NO: 2752 - RNA, 36 nt, Artificial Sequence
  Description of Artificial Sequence:  Enzymatic Nucleic Acid Molecule
cagcagacugaugaggccguuaggccgaaaguugcu

SEQ ID NO: 2753 - RNA, 36 nt, Artificial Sequence
  Description of Artificial Sequence:  Enzymatic Nucleic Acid Molecule
cgcagcacugaugaggccguuaggccgaaagaguug

SEQ ID NO: 2754 - RNA, 36 nt, Artificial Sequence
  Description of Artificial Sequence:  Enzymatic Nucleic Acid Molecule
uuguggucugaugaggccguuaggccgaaacgcagc

SEQ ID NO: 2755 - RNA, 36 nt, Artificial Sequence
  Description of Artificial Sequence:  Enzymatic Nucleic Acid Molecule
uggcauacugaugaggccguuaggccgaaaccaugu

SEQ ID NO: 2756 - RNA, 36 nt, Artificial Sequence
  Description of Artificial Sequence:  Enzymatic Nucleic Acid Molecule
uguggcacugaugaggccguuaggccgaaagaccau

SEQ ID NO: 2757 - RNA, 36 nt, Artificial Sequence
  Description of Artificial Sequence:  Enzymatic Nucleic Acid Molecule
caaaggucugaugaggccguuaggccgaaaccuucu

SEQ ID NO: 2758 - RNA, 36 nt, Artificial Sequence
  Description of Artificial Sequence:  Enzymatic Nucleic Acid Molecule
ucugucacugaugaggccguuaggccgaaaggugac

SEQ ID NO: 2759 - RNA, 36 nt, Artificial Sequence
  Description of Artificial Sequence:  Enzymatic Nucleic Acid Molecule
gucuguccugaugaggccguuaggccgaaaagguga

SEQ ID NO: 2760 - RNA, 36 nt, Artificial Sequence
  Description of Artificial Sequence:  Enzymatic Nucleic Acid Molecule
ucuccuucugaugaggccguuaggccgaaagcacgu

SEQ ID NO: 2761 - RNA, 36 nt, Artificial Sequence
  Description of Artificial Sequence:  Enzymatic Nucleic Acid Molecule
aacugugcugaugaggccguuaggccgaaacgccuu

SEQ ID NO: 2762 - RNA, 36 nt, Artificial Sequence
  Description of Artificial Sequence:  Enzymatic Nucleic Acid Molecule
uagccuucugaugaggccguuaggccgaaacugugg

SEQ ID NO: 2763 - RNA, 36 nt, Artificial Sequence
  Description of Artificial Sequence:  Enzymatic Nucleic Acid Molecule
uuagccucugaugaggccguuaggccgaaaacugug

SEQ ID NO: 2764 - RNA, 36 nt, Artificial Sequence
  Description of Artificial Sequence:  Enzymatic Nucleic Acid Molecule
cggauagcugaugaggccguuaggccgaaaguuuag

SEQ ID NO: 2765 - RNA, 36 nt, Artificial Sequence
  Description of Artificial Sequence:  Enzymatic Nucleic Acid Molecule
acggauacugaugaggccguuaggccgaaaaguuua

SEQ ID NO: 2766 - RNA, 36 nt, Artificial Sequence
  Description of Artificial Sequence:  Enzymatic Nucleic Acid Molecule
uuggccgcugaugaggccguuaggccgaaauguggg

SEQ ID NO: 2767 - RNA, 36 nt, Artificial Sequence
  Description of Artificial Sequence:  Enzymatic Nucleic Acid Molecule
uuuggcccugaugaggccguuaggccgaaaaugugg

SEQ ID NO: 2768 - RNA, 36 nt, Artificial Sequence
  Description of Artificial Sequence:  Enzymatic Nucleic Acid Molecule
gguuccgcugaugaggccguuaggccgaaacguccu

SEQ ID NO: 2769 - RNA, 36 nt, Artificial Sequence
  Description of Artificial Sequence:  Enzymatic Nucleic Acid Molecule
ugcuggacugaugaggccguuaggccgaaagguucc

SEQ ID NO: 2770 - RNA, 36 nt, Artificial Sequence
  Description of Artificial Sequence:  Enzymatic Nucleic Acid Molecule
cuugcugcugaugaggccguuaggccgaaauagguu

SEQ ID NO: 2771 - RNA, 36 nt, Artificial Sequence
  Description of Artificial Sequence:  Enzymatic Nucleic Acid Molecule
ugugguucugaugaggccguuaggccgaaauggccu

SEQ ID NO: 2772 - RNA, 36 nt, Artificial Sequence
  Description of Artificial Sequence:  Enzymatic Nucleic Acid Molecule
auguggucugaugaggccguuaggccgaaaauggcc

SEQ ID NO: 2773 - RNA, 36 nt, Artificial Sequence
  Description of Artificial Sequence:  Enzymatic Nucleic Acid Molecule
ugguguccugaugaggccguuaggccgaaauuggug

SEQ ID NO: 2774 - RNA, 36 nt, Artificial Sequence
  Description of Artificial Sequence:  Enzymatic Nucleic Acid Molecule
uugccaucugaugaggccguuaggccgaaauggugg

SEQ ID NO: 2775 - RNA, 36 nt, Artificial Sequence
  Description of Artificial Sequence:  Enzymatic Nucleic Acid Molecule
cgcagaacugaugaggccguuaggccgaaacuucac

SEQ ID NO: 2776 - RNA, 36 nt, Artificial Sequence
  Description of Artificial Sequence:  Enzymatic Nucleic Acid Molecule
acgcagacugaugaggccguuaggccgaaaacuuca

SEQ ID NO: 2777 - RNA, 36 nt, Artificial Sequence
  Description of Artificial Sequence:  Enzymatic Nucleic Acid Molecule
gacgcagcugaugaggccguuaggccgaaaaacuuc

SEQ ID NO: 2778 - RNA, 36 nt, Artificial Sequence
  Description of Artificial Sequence:  Enzymatic Nucleic Acid Molecule
ggacgcacugaugaggccguuaggccgaaaaaacuu

SEQ ID NO: 2779 - RNA, 36 nt, Artificial Sequence
  Description of Artificial Sequence:  Enzymatic Nucleic Acid Molecule
ccgguugcugaugaggccguuaggccgaaacgcaga

SEQ ID NO: 2780 - RNA, 36 nt, Artificial Sequence
  Description of Artificial Sequence:  Enzymatic Nucleic Acid Molecule
auaaggccugaugaggccguuaggccgaaagcuggc

SEQ ID NO: 2781 - RNA, 36 nt, Artificial Sequence
  Description of Artificial Sequence:  Enzymatic Nucleic Acid Molecule
cugggaacugaugaggccguuaggccgaaacgauaa

SEQ ID NO: 2782 - RNA, 36 nt, Artificial Sequence
  Description of Artificial Sequence:  Enzymatic Nucleic Acid Molecule
gucugggcugaugaggccguuaggccgaaauacgau

SEQ ID NO: 2783 - RNA, 36 nt, Artificial Sequence
  Description of Artificial Sequence:  Enzymatic Nucleic Acid Molecule
ggucuggcugaugaggccguuaggccgaaaauacga

SEQ ID NO: 2784 - RNA, 36 nt, Artificial Sequence
  Description of Artificial Sequence:  Enzymatic Nucleic Acid Molecule
auacacgcugaugaggccguuaggccgaaacuccca

SEQ ID NO: 2785 - RNA, 36 nt, Artificial Sequence
  Description of Artificial Sequence:  Enzymatic Nucleic Acid Molecule
cauacaccugaugaggccguuaggccgaaaacuccc

SEQ ID NO: 2786 - RNA, 36 nt, Artificial Sequence
  Description of Artificial Sequence:  Enzymatic Nucleic Acid Molecule
ucucgcacugaugaggccguuaggccgaaacacgaa

SEQ ID NO: 2787 - RNA, 36 nt, Artificial Sequence
  Description of Artificial Sequence:  Enzymatic Nucleic Acid Molecule
ucguaaacugaugaggccguuaggccgaaagccauu

SEQ ID NO: 2788 - RNA, 36 nt, Artificial Sequence
  Description of Artificial Sequence:  Enzymatic Nucleic Acid Molecule
cgucguacugaugaggccguuaggccgaaagagcca

SEQ ID NO: 2789 - RNA, 36 nt, Artificial Sequence
  Description of Artificial Sequence:  Enzymatic Nucleic Acid Molecule
acgucgucugaugaggccguuaggccgaaaagagcc

SEQ ID NO: 2790 - RNA, 36 nt, Artificial Sequence
  Description of Artificial Sequence:  Enzymatic Nucleic Acid Molecule
cacgucgcugaugaggccguuaggccgaaaaagagc

SEQ ID NO: 2791 - RNA, 36 nt, Artificial Sequence
  Description of Artificial Sequence:  Enzymatic Nucleic Acid Molecule
ggguggacugaugaggccguuaggccgaaaccacgu

SEQ ID NO: 2792 - RNA, 36 nt, Artificial Sequence
  Description of Artificial Sequence:  Enzymatic Nucleic Acid Molecule
aagggugcugaugaggccguuaggccgaaagaccac

SEQ ID NO: 2793 - RNA, 36 nt, Artificial Sequence
  Description of Artificial Sequence:  Enzymatic Nucleic Acid Molecule
ccugaggcugaugaggccguuaggccgaaagggugg

SEQ ID NO: 2794 - RNA, 36 nt, Artificial Sequence
  Description of Artificial Sequence:  Enzymatic Nucleic Acid Molecule
gccugagcugaugaggccguuaggccgaaaagggug

SEQ ID NO: 2795 - RNA, 36 nt, Artificial Sequence
  Description of Artificial Sequence:  Enzymatic Nucleic Acid Molecule
acggccucugaugaggccguuaggccgaaaggaagg

SEQ ID NO: 2796 - RNA, 36 nt, Artificial Sequence
  Description of Artificial Sequence:  Enzymatic Nucleic Acid Molecule
guacgagcugaugaggccguuaggccgaaagcccau

SEQ ID NO: 2797 - RNA, 36 nt, Artificial Sequence
  Description of Artificial Sequence:  Enzymatic Nucleic Acid Molecule
uccguaccugaugaggccguuaggccgaaaggagcc

SEQ ID NO: 2798 - RNA, 36 nt, Artificial Sequence
  Description of Artificial Sequence:  Enzymatic Nucleic Acid Molecule
aguacugcugaugaggccguuaggccgaaaauccgu

SEQ ID NO: 2799 - RNA, 36 nt, Artificial Sequence
  Description of Artificial Sequence:  Enzymatic Nucleic Acid Molecule
cccaggacugaugaggccguuaggccgaaaguacug

SEQ ID NO: 2800 - RNA, 36 nt, Artificial Sequence
  Description of Artificial Sequence:  Enzymatic Nucleic Acid Molecule
aagcccacugaugaggccguuaggccgaaagggcuu

SEQ ID NO: 2801 - RNA, 36 nt, Artificial Sequence
  Description of Artificial Sequence:  Enzymatic Nucleic Acid Molecule
auacgagcugaugaggccguuaggccgaaagcccau

SEQ ID NO: 2802 - RNA, 36 nt, Artificial Sequence
  Description of Artificial Sequence:  Enzymatic Nucleic Acid Molecule
cauacgacugaugaggccguuaggccgaaaagccca

SEQ ID NO: 2803 - RNA, 36 nt, Artificial Sequence
  Description of Artificial Sequence:  Enzymatic Nucleic Acid Molecule
gucauaccugaugaggccguuaggccgaaagaagcc

SEQ ID NO: 2804 - RNA, 36 nt, Artificial Sequence
  Description of Artificial Sequence:  Enzymatic Nucleic Acid Molecule
ggugucacugaugaggccguuaggccgaaacgagaa

SEQ ID NO: 2805 - RNA, 36 nt, Artificial Sequence
  Description of Artificial Sequence:  Enzymatic Nucleic Acid Molecule
ugagucacugaugaggccguuaggccgaaagcagcg

SEQ ID NO: 2806 - RNA, 36 nt, Artificial Sequence
  Description of Artificial Sequence:  Enzymatic Nucleic Acid Molecule
uugaguccugaugaggccguuaggccgaaaagcagc

SEQ ID NO: 2807 - RNA, 36 nt, Artificial Sequence
  Description of Artificial Sequence:  Enzymatic Nucleic Acid Molecule
gacuguucugaugaggccguuaggccgaaagucaaa

SEQ ID NO: 2808 - RNA, 36 nt, Artificial Sequence
  Description of Artificial Sequence:  Enzymatic Nucleic Acid Molecule
ucucagucugaugaggccguuaggccgaaacuguug

SEQ ID NO: 2809 - RNA, 36 nt, Artificial Sequence
  Description of Artificial Sequence:  Enzymatic Nucleic Acid Molecule
caacacgcugaugaggccguuaggccgaaaugucgc

SEQ ID NO: 2810 - RNA, 36 nt, Artificial Sequence
  Description of Artificial Sequence:  Enzymatic Nucleic Acid Molecule
acuccuccugaugaggccguuaggccgaaacacgga

SEQ ID NO: 2811 - RNA, 36 nt, Artificial Sequence
  Description of Artificial Sequence:  Enzymatic Nucleic Acid Molecule
guagauucugaugaggccguuaggccgaaacuccuc

SEQ ID NO: 2812 - RNA, 36 nt, Artificial Sequence
  Description of Artificial Sequence:  Enzymatic Nucleic Acid Molecule
auugguacugaugaggccguuaggccgaaauugacu

SEQ ID NO: 2813 - RNA, 36 nt, Artificial Sequence
  Description of Artificial Sequence:  Enzymatic Nucleic Acid Molecule
acauuggcugaugaggccguuaggccgaaagauuga

SEQ ID NO: 2814 - RNA, 36 nt, Artificial Sequence
  Description of Artificial Sequence:  Enzymatic Nucleic Acid Molecule
aagucaccugaugaggccguuaggccgaaacauugg

SEQ ID NO: 2815 - RNA, 36 nt, Artificial Sequence
  Description of Artificial Sequence:  Enzymatic Nucleic Acid Molecule
gggggcccugaugaggccguuaggccgaaagucaca

SEQ ID NO: 2816 - RNA, 36 nt, Artificial Sequence
  Description of Artificial Sequence:  Enzymatic Nucleic Acid Molecule
uuugaaucugaugaggccguuaggccgaaagucagg

SEQ ID NO: 2817 - RNA, 36 nt, Artificial Sequence
  Description of Artificial Sequence:  Enzymatic Nucleic Acid Molecule
ccuuuugcugaugaggccguuaggccgaaauuaguc

SEQ ID NO: 2818 - RNA, 36 nt, Artificial Sequence
  Description of Artificial Sequence:  Enzymatic Nucleic Acid Molecule
cccuuuucugaugaggccguuaggccgaaaauuagu

SEQ ID NO: 2819 - RNA, 36 nt, Artificial Sequence
  Description of Artificial Sequence:  Enzymatic Nucleic Acid Molecule
gugagggcugaugaggccguuaggccgaaauugccg

SEQ ID NO: 2820 - RNA, 36 nt, Artificial Sequence
  Description of Artificial Sequence:  Enzymatic Nucleic Acid Molecule
agcaugucugaugaggccguuaggccgaaaggguau

SEQ ID NO: 2821 - RNA, 36 nt, Artificial Sequence
  Description of Artificial Sequence:  Enzymatic Nucleic Acid Molecule
uuucaagcugaugaggccguuaggccgaaagcaugu

SEQ ID NO: 2822 - RNA, 36 nt, Artificial Sequence
  Description of Artificial Sequence:  Enzymatic Nucleic Acid Molecule
ggcuuuccugaugaggccguuaggccgaaaguagca

SEQ ID NO: 2823 - RNA, 36 nt, Artificial Sequence
  Description of Artificial Sequence:  Enzymatic Nucleic Acid Molecule
ucacagacugaugaggccguuaggccgaaaacgaca

SEQ ID NO: 2824 - RNA, 36 nt, Artificial Sequence
  Description of Artificial Sequence:  Enzymatic Nucleic Acid Molecule
uuucacacugaugaggccguuaggccgaaauaacga

SEQ ID NO: 2825 - RNA, 36 nt, Artificial Sequence
  Description of Artificial Sequence:  Enzymatic Nucleic Acid Molecule
agacucgcugaugaggccguuaggccgaaaggcucg

SEQ ID NO: 2826 - RNA, 36 nt, Artificial Sequence
  Description of Artificial Sequence:  Enzymatic Nucleic Acid Molecule
ccgugaacugaugaggccguuaggccgaaacucgua

SEQ ID NO: 2827 - RNA, 36 nt, Artificial Sequence
  Description of Artificial Sequence:  Enzymatic Nucleic Acid Molecule
cuccgugcugaugaggccguuaggccgaaagacucg

SEQ ID NO: 2828 - RNA, 36 nt, Artificial Sequence
  Description of Artificial Sequence:  Enzymatic Nucleic Acid Molecule
ccuccgucugaugaggccguuaggccgaaaagacuc

SEQ ID NO: 2829 - RNA, 36 nt, Artificial Sequence
  Description of Artificial Sequence:  Enzymatic Nucleic Acid Molecule
cuagucacugaugaggccguuaggccgaaagccucc

SEQ ID NO: 2830 - RNA, 36 nt, Artificial Sequence
  Description of Artificial Sequence:  Enzymatic Nucleic Acid Molecule
gaguacccugaugaggccguuaggccgaaagucaua

SEQ ID NO: 2831 - RNA, 36 nt, Artificial Sequence
  Description of Artificial Sequence:  Enzymatic Nucleic Acid Molecule
ggcagagcugaugaggccguuaggccgaaaccuagu

SEQ ID NO: 2832 - RNA, 36 nt, Artificial Sequence
  Description of Artificial Sequence:  Enzymatic Nucleic Acid Molecule
caacucccugaugaggccguuaggccgaaagucgua

SEQ ID NO: 2833 - RNA, 36 nt, Artificial Sequence
  Description of Artificial Sequence:  Enzymatic Nucleic Acid Molecule
uguuauccugaugaggccguuaggccgaaacuccaa

SEQ ID NO: 2834 - RNA, 36 nt, Artificial Sequence
  Description of Artificial Sequence:  Enzymatic Nucleic Acid Molecule
augaugucugaugaggccguuaggccgaaaucaacu

SEQ ID NO: 2835 - RNA, 36 nt, Artificial Sequence
  Description of Artificial Sequence:  Enzymatic Nucleic Acid Molecule
ggagcaucugaugaggccguuaggccgaaauguuau

SEQ ID NO: 2836 - RNA, 36 nt, Artificial Sequence
  Description of Artificial Sequence:  Enzymatic Nucleic Acid Molecule
cgcgacccugaugaggccguuaggccgaaacacguu

SEQ ID NO: 2837 - RNA, 36 nt, Artificial Sequence
  Description of Artificial Sequence:  Enzymatic Nucleic Acid Molecule
cgugcgccugaugaggccguuaggccgaaaccgaca

SEQ ID NO: 2838 - RNA, 36 nt, Artificial Sequence
  Description of Artificial Sequence:  Enzymatic Nucleic Acid Molecule
gagguagcugaugaggccguuaggccgaaacacucu

SEQ ID NO: 2839 - RNA, 36 nt, Artificial Sequence
  Description of Artificial Sequence:  Enzymatic Nucleic Acid Molecule
agugaggcugaugaggccguuaggccgaaaguacac

SEQ ID NO: 2840 - RNA, 36 nt, Artificial Sequence
  Description of Artificial Sequence:  Enzymatic Nucleic Acid Molecule
cacgagucugaugaggccguuaggccgaaagguagu

SEQ ID NO: 2841 - RNA, 36 nt, Artificial Sequence
  Description of Artificial Sequence:  Enzymatic Nucleic Acid Molecule
ggaucaccugaugaggccguuaggccgaaagugagg

SEQ ID NO: 2842 - RNA, 36 nt, Artificial Sequence
  Description of Artificial Sequence:  Enzymatic Nucleic Acid Molecule
gugguggcugaugaggccguuaggccgaaaucacga

SEQ ID NO: 2843 - RNA, 36 nt, Artificial Sequence
  Description of Artificial Sequence:  Enzymatic Nucleic Acid Molecule
guguguccugaugaggccguuaggccgaaagcuguc

SEQ ID NO: 2844 - RNA, 36 nt, Artificial Sequence
  Description of Artificial Sequence:  Enzymatic Nucleic Acid Molecule
uugacugcugaugaggccguuaggccgaaagugugu

SEQ ID NO: 2845 - RNA, 36 nt, Artificial Sequence
  Description of Artificial Sequence:  Enzymatic Nucleic Acid Molecule
aggaguucugaugaggccguuaggccgaaacuggag

SEQ ID NO: 2846 - RNA, 36 nt, Artificial Sequence
  Description of Artificial Sequence:  Enzymatic Nucleic Acid Molecule
uagccagcugaugaggccguuaggccgaaaguugac

SEQ ID NO: 2847 - RNA, 36 nt, Artificial Sequence
  Description of Artificial Sequence:  Enzymatic Nucleic Acid Molecule
uguugcccugaugaggccguuaggccgaaagccagg

SEQ ID NO: 2848 - RNA, 36 nt, Artificial Sequence
  Description of Artificial Sequence:  Enzymatic Nucleic Acid Molecule
acaugaucugaugaggccguuaggccgaaauguugc

SEQ ID NO: 2849 - RNA, 36 nt, Artificial Sequence
  Description of Artificial Sequence:  Enzymatic Nucleic Acid Molecule
cauacaucugaugaggccguuaggccgaaaugaugu

SEQ ID NO: 2850 - RNA, 36 nt, Artificial Sequence
  Description of Artificial Sequence:  Enzymatic Nucleic Acid Molecule
ucaucaacugaugaggccguuaggccgaaaucaucc

SEQ ID NO: 2851 - RNA, 36 nt, Artificial Sequence
  Description of Artificial Sequence:  Enzymatic Nucleic Acid Molecule
agucauccugaugaggccguuaggccgaaaaaucau

SEQ ID NO: 2852 - RNA, 36 nt, Artificial Sequence
  Description of Artificial Sequence:  Enzymatic Nucleic Acid Molecule
ggagaagcugaugaggccguuaggccgaaagugagu

SEQ ID NO: 2853 - RNA, 36 nt, Artificial Sequence
  Description of Artificial Sequence:  Enzymatic Nucleic Acid Molecule
uggagaacugaugaggccguuaggccgaaaagugag

SEQ ID NO: 2854 - RNA, 36 nt, Artificial Sequence
  Description of Artificial Sequence:  Enzymatic Nucleic Acid Molecule
gauggagcugaugaggccguuaggccgaaagaagug

SEQ ID NO: 2855 - RNA, 36 nt, Artificial Sequence
  Description of Artificial Sequence:  Enzymatic Nucleic Acid Molecule
ggauggacugaugaggccguuaggccgaaaagaagu

SEQ ID NO: 2856 - RNA, 36 nt, Artificial Sequence
  Description of Artificial Sequence:  Enzymatic Nucleic Acid Molecule
aaggaugcugaugaggccguuaggccgaaagaagaa

SEQ ID NO: 2857 - RNA, 36 nt, Artificial Sequence
  Description of Artificial Sequence:  Enzymatic Nucleic Acid Molecule
cuagaagcugaugaggccguuaggccgaaauggaga

SEQ ID NO: 2858 - RNA, 36 nt, Artificial Sequence
  Description of Artificial Sequence:  Enzymatic Nucleic Acid Molecule
gggcuagcugaugaggccguuaggccgaaaggaugg

SEQ ID NO: 2859 - RNA, 36 nt, Artificial Sequence
  Description of Artificial Sequence:  Enzymatic Nucleic Acid Molecule
ugggcuacugaugaggccguuaggccgaaaaggaug

SEQ ID NO: 2860 - RNA, 36 nt, Artificial Sequence
  Description of Artificial Sequence:  Enzymatic Nucleic Acid Molecule
ccugggccugaugaggccguuaggccgaaagaagga

SEQ ID NO: 2861 - RNA, 36 nt, Artificial Sequence
  Description of Artificial Sequence:  Enzymatic Nucleic Acid Molecule
ccuuuuccugaugaggccguuaggccgaaagcuguu

SEQ ID NO: 2862 - RNA, 36 nt, Artificial Sequence
  Description of Artificial Sequence:  Enzymatic Nucleic Acid Molecule
auggagucugaugaggccguuaggccgaaacaggcc

SEQ ID NO: 2863 - RNA, 36 nt, Artificial Sequence
  Description of Artificial Sequence:  Enzymatic Nucleic Acid Molecule
aauggagcugaugaggccguuaggccgaaaacaggc

SEQ ID NO: 2864 - RNA, 36 nt, Artificial Sequence
  Description of Artificial Sequence:  Enzymatic Nucleic Acid Molecule
cucaaugcugaugaggccguuaggccgaaaguaaca

SEQ ID NO: 2865 - RNA, 36 nt, Artificial Sequence
  Description of Artificial Sequence:  Enzymatic Nucleic Acid Molecule
guggcuccugaugaggccguuaggccgaaauggagu

SEQ ID NO: 2866 - RNA, 36 nt, Artificial Sequence
  Description of Artificial Sequence:  Enzymatic Nucleic Acid Molecule
guagguccugaugaggccguuaggccgaaaguggcu

SEQ ID NO: 2867 - RNA, 36 nt, Artificial Sequence
  Description of Artificial Sequence:  Enzymatic Nucleic Acid Molecule
ucugaggcugaugaggccguuaggccgaaaggucaa

SEQ ID NO: 2868 - RNA, 36 nt, Artificial Sequence
  Description of Artificial Sequence:  Enzymatic Nucleic Acid Molecule
augaucucugaugaggccguuaggccgaaagguagg

SEQ ID NO: 2869 - RNA, 36 nt, Artificial Sequence
  Description of Artificial Sequence:  Enzymatic Nucleic Acid Molecule
guugaaucugaugaggccguuaggccgaaaucugag

SEQ ID NO: 2870 - RNA, 36 nt, Artificial Sequence
  Description of Artificial Sequence:  Enzymatic Nucleic Acid Molecule
gucguugcugaugaggccguuaggccgaaaugaucu

SEQ ID NO: 2871 - RNA, 36 nt, Artificial Sequence
  Description of Artificial Sequence:  Enzymatic Nucleic Acid Molecule
agucguucugaugaggccguuaggccgaaaaugauc

SEQ ID NO: 2872 - RNA, 36 nt, Artificial Sequence
  Description of Artificial Sequence:  Enzymatic Nucleic Acid Molecule
gaccaugcugaugaggccguuaggccgaaagucguu

SEQ ID NO: 2873 - RNA, 36 nt, Artificial Sequence
  Description of Artificial Sequence:  Enzymatic Nucleic Acid Molecule
gcgcuaacugaugaggccguuaggccgaaaccaugg

SEQ ID NO: 2874 - RNA, 36 nt, Artificial Sequence
  Description of Artificial Sequence:  Enzymatic Nucleic Acid Molecule
augcgcucugaugaggccguuaggccgaaagaccau

SEQ ID NO: 2875 - RNA, 36 nt, Artificial Sequence
  Description of Artificial Sequence:  Enzymatic Nucleic Acid Molecule
aaugcgccugaugaggccguuaggccgaaaagacca

SEQ ID NO: 2876 - RNA, 36 nt, Artificial Sequence
  Description of Artificial Sequence:  Enzymatic Nucleic Acid Molecule
gagugagcugaugaggccguuaggccgaaaugcgcu

SEQ ID NO: 2877 - RNA, 36 nt, Artificial Sequence
  Description of Artificial Sequence:  Enzymatic Nucleic Acid Molecule
ggagugacugaugaggccguuaggccgaaaaugcgc

SEQ ID NO: 2878 - RNA, 36 nt, Artificial Sequence
  Description of Artificial Sequence:  Enzymatic Nucleic Acid Molecule
auggagucugaugaggccguuaggccgaaagaaugc

SEQ ID NO: 2879 - RNA, 36 nt, Artificial Sequence
  Description of Artificial Sequence:  Enzymatic Nucleic Acid Molecule
aacuaugcugaugaggccguuaggccgaaagugaga

SEQ ID NO: 2880 - RNA, 36 nt, Artificial Sequence
  Description of Artificial Sequence:  Enzymatic Nucleic Acid Molecule
gaguaaccugaugaggccguuaggccgaaauggagu

SEQ ID NO: 2881 - RNA, 36 nt, Artificial Sequence
  Description of Artificial Sequence:  Enzymatic Nucleic Acid Molecule
ggagagucugaugaggccguuaggccgaaacuaugg

SEQ ID NO: 2882 - RNA, 36 nt, Artificial Sequence
  Description of Artificial Sequence:  Enzymatic Nucleic Acid Molecule
uggagagcugaugaggccguuaggccgaaaacuaug

SEQ ID NO: 2883 - RNA, 36 nt, Artificial Sequence
  Description of Artificial Sequence:  Enzymatic Nucleic Acid Molecule
accuggacugaugaggccguuaggccgaaaguaacu

SEQ ID NO: 2884 - RNA, 36 nt, Artificial Sequence
  Description of Artificial Sequence:  Enzymatic Nucleic Acid Molecule
ucaccugcugaugaggccguuaggccgaaagaguaa

SEQ ID NO: 2885 - RNA, 36 nt, Artificial Sequence
  Description of Artificial Sequence:  Enzymatic Nucleic Acid Molecule
cccuauucugaugaggccguuaggccgaaaucucac

SEQ ID NO: 2886 - RNA, 36 nt, Artificial Sequence
  Description of Artificial Sequence:  Enzymatic Nucleic Acid Molecule
gccaccccugaugaggccguuaggccgaaauugauc

SEQ ID NO: 2887 - RNA, 36 nt, Artificial Sequence
  Description of Artificial Sequence:  Enzymatic Nucleic Acid Molecule
aggcaugcugaugaggccguuaggccgaaagccacc

SEQ ID NO: 2888 - RNA, 36 nt, Artificial Sequence
  Description of Artificial Sequence:  Enzymatic Nucleic Acid Molecule
gaggcaucugaugaggccguuaggccgaaaagccac

SEQ ID NO: 2889 - RNA, 36 nt, Artificial Sequence
  Description of Artificial Sequence:  Enzymatic Nucleic Acid Molecule
cuggccccugaugaggccguuaggccgaaaugucuc

SEQ ID NO: 2890 - RNA, 36 nt, Artificial Sequence
  Description of Artificial Sequence:  Enzymatic Nucleic Acid Molecule
gaagaggcugaugaggccguuaggccgaaacuugcc

SEQ ID NO: 2891 - RNA, 36 nt, Artificial Sequence
  Description of Artificial Sequence:  Enzymatic Nucleic Acid Molecule
aguugaacugaugaggccguuaggccgaaagguacu

SEQ ID NO: 2892 - RNA, 36 nt, Artificial Sequence
  Description of Artificial Sequence:  Enzymatic Nucleic Acid Molecule
ccaguugcugaugaggccguuaggccgaaagaggua

SEQ ID NO: 2893 - RNA, 36 nt, Artificial Sequence
  Description of Artificial Sequence:  Enzymatic Nucleic Acid Molecule
cccaguucugaugaggccguuaggccgaaaagaggu

SEQ ID NO: 2894 - RNA, 36 nt, Artificial Sequence
  Description of Artificial Sequence:  Enzymatic Nucleic Acid Molecule
ugguccucugaugaggccguuaggccgaaacugccc

SEQ ID NO: 2895 - RNA, 36 nt, Artificial Sequence
  Description of Artificial Sequence:  Enzymatic Nucleic Acid Molecule
ugaguuucugaugaggccguuaggccgaaagcuugg

SEQ ID NO: 2896 - RNA, 36 nt, Artificial Sequence
  Description of Artificial Sequence:  Enzymatic Nucleic Acid Molecule
uuggagucugaugaggccguuaggccgaaaguuuga

SEQ ID NO: 2897 - RNA, 36 nt, Artificial Sequence
  Description of Artificial Sequence:  Enzymatic Nucleic Acid Molecule
gggauugcugaugaggccguuaggccgaaagugagu

SEQ ID NO: 2898 - RNA, 36 nt, Artificial Sequence
  Description of Artificial Sequence:  Enzymatic Nucleic Acid Molecule
cggccggcugaugaggccguuaggccgaaauuggag

SEQ ID NO: 2899 - RNA, 36 nt, Artificial Sequence
  Description of Artificial Sequence:  Enzymatic Nucleic Acid Molecule
ccgcugucugaugaggccguuaggccgaaaccagca

SEQ ID NO: 2900 - RNA, 36 nt, Artificial Sequence
  Description of Artificial Sequence:  Enzymatic Nucleic Acid Molecule
cccgcugcugaugaggccguuaggccgaaaaccagc

SEQ ID NO: 2901 - RNA, 36 nt, Artificial Sequence
  Description of Artificial Sequence:  Enzymatic Nucleic Acid Molecule
cgggcaccugaugaggccguuaggccgaaagacagg

SEQ ID NO: 2902 - RNA, 36 nt, Artificial Sequence
  Description of Artificial Sequence:  Enzymatic Nucleic Acid Molecule
ccacauacugaugaggccguuaggccgaaaccagcg

SEQ ID NO: 2903 - RNA, 36 nt, Artificial Sequence
  Description of Artificial Sequence:  Enzymatic Nucleic Acid Molecule
accacaucugaugaggccguuaggccgaaaaccagc

SEQ ID NO: 2904 - RNA, 36 nt, Artificial Sequence
  Description of Artificial Sequence:  Enzymatic Nucleic Acid Molecule
caccacacugaugaggccguuaggccgaaaaaccag

SEQ ID NO: 2905 - RNA, 36 nt, Artificial Sequence
  Description of Artificial Sequence:  Enzymatic Nucleic Acid Molecule
aaaagggcugaugaggccguuaggccgaaauggccu

SEQ ID NO: 2906 - RNA, 36 nt, Artificial Sequence
  Description of Artificial Sequence:  Enzymatic Nucleic Acid Molecule
aaaaaaacugaugaggccguuaggccgaaaggggau

SEQ ID NO: 2907 - RNA, 50 nt, Artificial Sequence
  Description of Artificial Sequence:  Enzymatic Nucleic Acid Molecule
cccccaagaaggggaccagagaaacacacguugugguacauuaccuggua

SEQ ID NO: 2908 - RNA, 50 nt, Artificial Sequence
  Description of Artificial Sequence:  Enzymatic Nucleic Acid Molecule
cgugaaagaaguagaccagagaaacacacguugugguacauuaccuggua

SEQ ID NO: 2909 - RNA, 50 nt, Artificial Sequence
  Description of Artificial Sequence:  Enzymatic Nucleic Acid Molecule
ccuggaagaagcacaccagagaaacacacguugugguacauuaccuggua

SEQ ID NO: 2910 - RNA, 50 nt, Artificial Sequence
  Description of Artificial Sequence:  Enzymatic Nucleic Acid Molecule
gcauugagaagguuaccagagaaacacacguugugguacauuaccuggua

SEQ ID NO: 2911 - RNA, 50 nt, Artificial Sequence
  Description of Artificial Sequence:  Enzymatic Nucleic Acid Molecule
cuaucaagaaguacaccagagaaacacacguugugguacauuaccuggua

SEQ ID NO: 2912 - RNA, 50 nt, Artificial Sequence
  Description of Artificial Sequence:  Enzymatic Nucleic Acid Molecule
gugggcagaaguagaccagagaaacacacguugugguacauuaccuggua

SEQ ID NO: 2913 - RNA, 50 nt, Artificial Sequence
  Description of Artificial Sequence:  Enzymatic Nucleic Acid Molecule
ccugugagaagcggaccagagaaacacacguugugguacauuaccuggua

SEQ ID NO: 2914 - RNA, 50 nt, Artificial Sequence
  Description of Artificial Sequence:  Enzymatic Nucleic Acid Molecule
ccaacgagaagaccaccagagaaacacacguugugguacauuaccuggua

SEQ ID NO: 2915 - RNA, 50 nt, Artificial Sequence
  Description of Artificial Sequence:  Enzymatic Nucleic Acid Molecule
gguugcagaaguucaccagagaaacacacguugugguacauuaccuggua

SEQ ID NO: 2916 - RNA, 50 nt, Artificial Sequence
  Description of Artificial Sequence:  Enzymatic Nucleic Acid Molecule
ccucggagaagcgaaccagagaaacacacguugugguacauuaccuggua

SEQ ID NO: 2917 - RNA, 50 nt, Artificial Sequence
  Description of Artificial Sequence:  Enzymatic Nucleic Acid Molecule
uacccaagaagagcaccagagaaacacacguugugguacauuaccuggua

SEQ ID NO: 2918 - RNA, 50 nt, Artificial Sequence
  Description of Artificial Sequence:  Enzymatic Nucleic Acid Molecule
gccgggagaagcggaccagagaaacacacguugugguacauuaccuggua

SEQ ID NO: 2919 - RNA, 50 nt, Artificial Sequence
  Description of Artificial Sequence:  Enzymatic Nucleic Acid Molecule
caacuaagaagggaaccagagaaacacacguugugguacauuaccuggua

SEQ ID NO: 2920 - RNA, 50 nt, Artificial Sequence
  Description of Artificial Sequence:  Enzymatic Nucleic Acid Molecule
ccggggagaaguggaccagagaaacacacguugugguacauuaccuggua

SEQ ID NO: 2921 - RNA, 50 nt, Artificial Sequence
  Description of Artificial Sequence:  Enzymatic Nucleic Acid Molecule
cggcgaagaagcacaccagagaaacacacguugugguacauuaccuggua

SEQ ID NO: 2922 - RNA, 50 nt, Artificial Sequence
  Description of Artificial Sequence:  Enzymatic Nucleic Acid Molecule
caugagagaagcgaaccagagaaacacacguugugguacauuaccuggua

SEQ ID NO: 2923 - RNA, 50 nt, Artificial Sequence
  Description of Artificial Sequence:  Enzymatic Nucleic Acid Molecule
ccgacgagaagaauaccagagaaacacacguugugguacauuaccuggua

SEQ ID NO: 2924 - RNA, 50 nt, Artificial Sequence
  Description of Artificial Sequence:  Enzymatic Nucleic Acid Molecule
aagagcagaagggcaccagagaaacacacguugugguacauuaccuggua

SEQ ID NO: 2925 - RNA, 50 nt, Artificial Sequence
  Description of Artificial Sequence:  Enzymatic Nucleic Acid Molecule
caggacagaagggcaccagagaaacacacguugugguacauuaccuggua

SEQ ID NO: 2926 - RNA, 50 nt, Artificial Sequence
  Description of Artificial Sequence:  Enzymatic Nucleic Acid Molecule
aaacagagaagcagaccagagaaacacacguugugguacauuaccuggua

SEQ ID NO: 2927 - RNA, 50 nt, Artificial Sequence
  Description of Artificial Sequence:  Enzymatic Nucleic Acid Molecule
uggucaagaaggacaccagagaaacacacguugugguacauuaccuggua

SEQ ID NO: 2928 - RNA, 50 nt, Artificial Sequence
  Description of Artificial Sequence:  Enzymatic Nucleic Acid Molecule
agcggaagaagggaaccagagaaacacacguugugguacauuaccuggua

SEQ ID NO: 2929 - RNA, 50 nt, Artificial Sequence
  Description of Artificial Sequence:  Enzymatic Nucleic Acid Molecule
cugauaagaagaagaccagagaaacacacguugugguacauuaccuggua

SEQ ID NO: 2930 - RNA, 50 nt, Artificial Sequence
  Description of Artificial Sequence:  Enzymatic Nucleic Acid Molecule
aguuggagaagucaaccagagaaacacacguugugguacauuaccuggua

SEQ ID NO: 2931 - RNA, 50 nt, Artificial Sequence
  Description of Artificial Sequence:  Enzymatic Nucleic Acid Molecule
cccaacagaaggagaccagagaaacacacguugugguacauuaccuggua

SEQ ID NO: 2932 - RNA, 50 nt, Artificial Sequence
  Description of Artificial Sequence:  Enzymatic Nucleic Acid Molecule
gaaagcagaagcccaccagagaaacacacguugugguacauuaccuggua

SEQ ID NO: 2933 - RNA, 50 nt, Artificial Sequence
  Description of Artificial Sequence:  Enzymatic Nucleic Acid Molecule
acagaaagaagccgaccagagaaacacacguugugguacauuaccuggua

SEQ ID NO: 2934 - RNA, 50 nt, Artificial Sequence
  Description of Artificial Sequence:  Enzymatic Nucleic Acid Molecule
uggcggagaagaaaaccagagaaacacacguugugguacauuaccuggua

SEQ ID NO: 2935 - RNA, 50 nt, Artificial Sequence
  Description of Artificial Sequence:  Enzymatic Nucleic Acid Molecule
aaacggagaagcagaccagagaaacacacguugugguacauuaccuggua

SEQ ID NO: 2936 - RNA, 50 nt, Artificial Sequence
  Description of Artificial Sequence:  Enzymatic Nucleic Acid Molecule
gaggaaagaagaucaccagagaaacacacguugugguacauuaccuggua

SEQ ID NO: 2937 - RNA, 50 nt, Artificial Sequence
  Description of Artificial Sequence:  Enzymatic Nucleic Acid Molecule
gugaacagaagggaaccagagaaacacacguugugguacauuaccuggua

SEQ ID NO: 2938 - RNA, 50 nt, Artificial Sequence
  Description of Artificial Sequence:  Enzymatic Nucleic Acid Molecule
cacuagagaaguugaccagagaaacacacguugugguacauuaccuggua

SEQ ID NO: 2939 - RNA, 50 nt, Artificial Sequence
  Description of Artificial Sequence:  Enzymatic Nucleic Acid Molecule
ugugggagaaggagaccagagaaacacacguugugguacauuaccuggua

SEQ ID NO: 2940 - RNA, 50 nt, Artificial Sequence
  Description of Artificial Sequence:  Enzymatic Nucleic Acid Molecule
auccacagaagcuuaccagagaaacacacguugugguacauuaccuggua

SEQ ID NO: 2941 - RNA, 50 nt, Artificial Sequence
  Description of Artificial Sequence:  Enzymatic Nucleic Acid Molecule
ucucugagaaggccaccagagaaacacacguugugguacauuaccuggua

SEQ ID NO: 2942 - RNA, 50 nt, Artificial Sequence
  Description of Artificial Sequence:  Enzymatic Nucleic Acid Molecule
uuuaugagaaggauaccagagaaacacacguugugguacauuaccuggua

SEQ ID NO: 2943 - RNA, 50 nt, Artificial Sequence
  Description of Artificial Sequence:  Enzymatic Nucleic Acid Molecule
ugugccagaagccaaccagagaaacacacguugugguacauuaccuggua

SEQ ID NO: 2944 - RNA, 50 nt, Artificial Sequence
  Description of Artificial Sequence:  Enzymatic Nucleic Acid Molecule
guucagagaaguccaccagagaaacacacguugugguacauuaccuggua

SEQ ID NO: 2945 - RNA, 50 nt, Artificial Sequence
  Description of Artificial Sequence:  Enzymatic Nucleic Acid Molecule
gcguagagaagugcaccagagaaacacacguugugguacauuaccuggua

SEQ ID NO: 2946 - RNA, 50 nt, Artificial Sequence
  Description of Artificial Sequence:  Enzymatic Nucleic Acid Molecule
cugggcagaaggacaccagagaaacacacguugugguacauuaccuggua

SEQ ID NO: 2947 - RNA, 50 nt, Artificial Sequence
  Description of Artificial Sequence:  Enzymatic Nucleic Acid Molecule
agcugcagaaggccaccagagaaacacacguugugguacauuaccuggua

SEQ ID NO: 2948 - RNA, 50 nt, Artificial Sequence
  Description of Artificial Sequence:  Enzymatic Nucleic Acid Molecule
cgauggagaagcagaccagagaaacacacguugugguacauuaccuggua

SEQ ID NO: 2949 - RNA, 50 nt, Artificial Sequence
  Description of Artificial Sequence:  Enzymatic Nucleic Acid Molecule
aaugccagaaguaaaccagagaaacacacguugugguacauuaccuggua

SEQ ID NO: 2950 - RNA, 50 nt, Artificial Sequence
  Description of Artificial Sequence:  Enzymatic Nucleic Acid Molecule
gggugaagaaguacaccagagaaacacacguugugguacauuaccuggua

SEQ ID NO: 2951 - RNA, 50 nt, Artificial Sequence
  Description of Artificial Sequence:  Enzymatic Nucleic Acid Molecule
cacuacagaagggcaccagagaaacacacguugugguacauuaccuggua

SEQ ID NO: 2952 - RNA, 50 nt, Artificial Sequence
  Description of Artificial Sequence:  Enzymatic Nucleic Acid Molecule
ggaccgagaagucgaccagagaaacacacguugugguacauuaccuggua

SEQ ID NO: 2953 - RNA, 50 nt, Artificial Sequence
  Description of Artificial Sequence:  Enzymatic Nucleic Acid Molecule
gcaccgagaagaucaccagagaaacacacguugugguacauuaccuggua

SEQ ID NO: 2954 - RNA, 50 nt, Artificial Sequence
  Description of Artificial Sequence:  Enzymatic Nucleic Acid Molecule
cagcacagaagucuaccagagaaacacacguugugguacauuaccuggua

SEQ ID NO: 2955 - RNA, 50 nt, Artificial Sequence
  Description of Artificial Sequence:  Enzymatic Nucleic Acid Molecule
uugagaagaagcacaccagagaaacacacguugugguacauuaccuggua

SEQ ID NO: 2956 - RNA, 50 nt, Artificial Sequence
  Description of Artificial Sequence:  Enzymatic Nucleic Acid Molecule
uguggcagaagcguaccagagaaacacacguugugguacauuaccuggua

SEQ ID NO: 2957 - RNA, 50 nt, Artificial Sequence
  Description of Artificial Sequence:  Enzymatic Nucleic Acid Molecule
ccguggagaaggucaccagagaaacacacguugugguacauuaccuggua

SEQ ID NO: 2958 - RNA, 50 nt, Artificial Sequence
  Description of Artificial Sequence:  Enzymatic Nucleic Acid Molecule
aaagcaagaaguggaccagagaaacacacguugugguacauuaccuggua

SEQ ID NO: 2959 - RNA, 50 nt, Artificial Sequence
  Description of Artificial Sequence:  Enzymatic Nucleic Acid Molecule
gcuccgagaaguccaccagagaaacacacguugugguacauuaccuggua

SEQ ID NO: 2960 - RNA, 50 nt, Artificial Sequence
  Description of Artificial Sequence:  Enzymatic Nucleic Acid Molecule
gcagcgagaagagcaccagagaaacacacguugugguacauuaccuggua

SEQ ID NO: 2961 - RNA, 50 nt, Artificial Sequence
  Description of Artificial Sequence:  Enzymatic Nucleic Acid Molecule
agcagcagaaggcuaccagagaaacacacguugugguacauuaccuggua

SEQ ID NO: 2962 - RNA, 50 nt, Artificial Sequence
  Description of Artificial Sequence:  Enzymatic Nucleic Acid Molecule
gacagcagaagcggaccagagaaacacacguugugguacauuaccuggua

SEQ ID NO: 2963 - RNA, 50 nt, Artificial Sequence
  Description of Artificial Sequence:  Enzymatic Nucleic Acid Molecule
guggacagaagcagaccagagaaacacacguugugguacauuaccuggua

SEQ ID NO: 2964 - RNA, 50 nt, Artificial Sequence
  Description of Artificial Sequence:  Enzymatic Nucleic Acid Molecule
gucgugagaagcagaccagagaaacacacguugugguacauuaccuggua

SEQ ID NO: 2965 - RNA, 50 nt, Artificial Sequence
  Description of Artificial Sequence:  Enzymatic Nucleic Acid Molecule
ugaaggagaagggaaccagagaaacacacguugugguacauuaccuggua

SEQ ID NO: 2966 - RNA, 50 nt, Artificial Sequence
  Description of Artificial Sequence:  Enzymatic Nucleic Acid Molecule
ggacagagaagguaaccagagaaacacacguugugguacauuaccuggua

SEQ ID NO: 2967 - RNA, 50 nt, Artificial Sequence
  Description of Artificial Sequence:  Enzymatic Nucleic Acid Molecule
ccagugagaagagcaccagagaaacacacguugugguacauuaccuggua

SEQ ID NO: 2968 - RNA, 50 nt, Artificial Sequence
  Description of Artificial Sequence:  Enzymatic Nucleic Acid Molecule
ggagacagaagcugaccagagaaacacacguugugguacauuaccuggua

SEQ ID NO: 2969 - RNA, 50 nt, Artificial Sequence
  Description of Artificial Sequence:  Enzymatic Nucleic Acid Molecule
gcgcgcagaagccaaccagagaaacacacguugugguacauuaccuggua

SEQ ID NO: 2970 - RNA, 50 nt, Artificial Sequence
  Description of Artificial Sequence:  Enzymatic Nucleic Acid Molecule
uccacaagaaggcaaccagagaaacacacguugugguacauuaccuggua

SEQ ID NO: 2971 - RNA, 50 nt, Artificial Sequence
  Description of Artificial Sequence:  Enzymatic Nucleic Acid Molecule
gcuaucagaagcauaccagagaaacacacguugugguacauuaccuggua

SEQ ID NO: 2972 - RNA, 50 nt, Artificial Sequence
  Description of Artificial Sequence:  Enzymatic Nucleic Acid Molecule
cucuagagaagccuaccagagaaacacacguugugguacauuaccuggua

SEQ ID NO: 2973 - RNA, 50 nt, Artificial Sequence
  Description of Artificial Sequence:  Enzymatic Nucleic Acid Molecule
aaugccagaagcucaccagagaaacacacguugugguacauuaccuggua

SEQ ID NO: 2974 - RNA, 50 nt, Artificial Sequence
  Description of Artificial Sequence:  Enzymatic Nucleic Acid Molecule
guaccaagaagcacaccagagaaacacacguugugguacauuaccuggua

SEQ ID NO: 2975 - RNA, 50 nt, Artificial Sequence
  Description of Artificial Sequence:  Enzymatic Nucleic Acid Molecule
aggagcagaagccaaccagagaaacacacguugugguacauuaccuggua

SEQ ID NO: 2976 - RNA, 50 nt, Artificial Sequence
  Description of Artificial Sequence:  Enzymatic Nucleic Acid Molecule
agcaggagaagcggaccagagaaacacacguugugguacauuaccuggua

SEQ ID NO: 2977 - RNA, 50 nt, Artificial Sequence
  Description of Artificial Sequence:  Enzymatic Nucleic Acid Molecule
agcaggagaaggagaccagagaaacacacguugugguacauuaccuggua

SEQ ID NO: 2978 - RNA, 50 nt, Artificial Sequence
  Description of Artificial Sequence:  Enzymatic Nucleic Acid Molecule
aacgccagaaggagaccagagaaacacacguugugguacauuaccuggua

SEQ ID NO: 2979 - RNA, 50 nt, Artificial Sequence
  Description of Artificial Sequence:  Enzymatic Nucleic Acid Molecule
ugggugagaagcacaccagagaaacacacguugugguacauuaccuggua

SEQ ID NO: 2980 - RNA, 50 nt, Artificial Sequence
  Description of Artificial Sequence:  Enzymatic Nucleic Acid Molecule
auggcgagaaggagaccagagaaacacacguugugguacauuaccuggua

SEQ ID NO: 2981 - RNA, 50 nt, Artificial Sequence
  Description of Artificial Sequence:  Enzymatic Nucleic Acid Molecule
ugagcgagaagagaaccagagaaacacacguugugguacauuaccuggua

SEQ ID NO: 2982 - RNA, 50 nt, Artificial Sequence
  Description of Artificial Sequence:  Enzymatic Nucleic Acid Molecule
accaugagaagaccaccagagaaacacacguugugguacauuaccuggua

SEQ ID NO: 2983 - RNA, 50 nt, Artificial Sequence
  Description of Artificial Sequence:  Enzymatic Nucleic Acid Molecule
gaagacagaaggcuaccagagaaacacacguugugguacauuaccuggua

SEQ ID NO: 2984 - RNA, 50 nt, Artificial Sequence
  Description of Artificial Sequence:  Enzymatic Nucleic Acid Molecule
gagacgagaaguccaccagagaaacacacguugugguacauuaccuggua

SEQ ID NO: 2985 - RNA, 50 nt, Artificial Sequence
  Description of Artificial Sequence:  Enzymatic Nucleic Acid Molecule
ggcggaagaaggcaaccagagaaacacacguugugguacauuaccuggua

SEQ ID NO: 2986 - RNA, 50 nt, Artificial Sequence
  Description of Artificial Sequence:  Enzymatic Nucleic Acid Molecule
ccuucgagaagagaaccagagaaacacacguugugguacauuaccuggua

SEQ ID NO: 2987 - RNA, 50 nt, Artificial Sequence
  Description of Artificial Sequence:  Enzymatic Nucleic Acid Molecule
gcuaucagaaggucaccagagaaacacacguugugguacauuaccuggua

SEQ ID NO: 2988 - RNA, 50 nt, Artificial Sequence
  Description of Artificial Sequence:  Enzymatic Nucleic Acid Molecule
ggcguaagaagugaaccagagaaacacacguugugguacauuaccuggua

SEQ ID NO: 2989 - RNA, 50 nt, Artificial Sequence
  Description of Artificial Sequence:  Enzymatic Nucleic Acid Molecule
guggaaagaaguccaccagagaaacacacguugugguacauuaccuggua

SEQ ID NO: 2990 - RNA, 50 nt, Artificial Sequence
  Description of Artificial Sequence:  Enzymatic Nucleic Acid Molecule
ucuuugagaaggcgaccagagaaacacacguugugguacauuaccuggua

SEQ ID NO: 2991 - RNA, 50 nt, Artificial Sequence
  Description of Artificial Sequence:  Enzymatic Nucleic Acid Molecule
cuuuugagaaggcuaccagagaaacacacguugugguacauuaccuggua

SEQ ID NO: 2992 - RNA, 50 nt, Artificial Sequence
  Description of Artificial Sequence:  Enzymatic Nucleic Acid Molecule
caugccagaagacgaccagagaaacacacguugugguacauuaccuggua

SEQ ID NO: 2993 - RNA, 50 nt, Artificial Sequence
  Description of Artificial Sequence:  Enzymatic Nucleic Acid Molecule
auagagagaagagcaccagagaaacacacguugugguacauuaccuggua

SEQ ID NO: 2994 - RNA, 50 nt, Artificial Sequence
  Description of Artificial Sequence:  Enzymatic Nucleic Acid Molecule
aaugacagaagcauaccagagaaacacacguugugguacauuaccuggua

SEQ ID NO: 2995 - RNA, 50 nt, Artificial Sequence
  Description of Artificial Sequence:  Enzymatic Nucleic Acid Molecule
caccgcagaagcgcaccagagaaacacacguugugguacauuaccuggua

SEQ ID NO: 2996 - RNA, 50 nt, Artificial Sequence
  Description of Artificial Sequence:  Enzymatic Nucleic Acid Molecule
ucccccagaagucaaccagagaaacacacguugugguacauuaccuggua

SEQ ID NO: 2997 - RNA, 50 nt, Artificial Sequence
  Description of Artificial Sequence:  Enzymatic Nucleic Acid Molecule
cuggggagaaguagaccagagaaacacacguugugguacauuaccuggua

SEQ ID NO: 2998 - RNA, 50 nt, Artificial Sequence
  Description of Artificial Sequence:  Enzymatic Nucleic Acid Molecule
agacggagaaggggaccagagaaacacacguugugguacauuaccuggua

SEQ ID NO: 2999 - RNA, 50 nt, Artificial Sequence
  Description of Artificial Sequence:  Enzymatic Nucleic Acid Molecule
auaggaagaaggucaccagagaaacacacguugugguacauuaccuggua

SEQ ID NO: 3000 - RNA, 50 nt, Artificial Sequence
  Description of Artificial Sequence:  Enzymatic Nucleic Acid Molecule
gggcagagaaguggaccagagaaacacacguugugguacauuaccuggua

SEQ ID NO: 3001 - RNA, 50 nt, Artificial Sequence
  Description of Artificial Sequence:  Enzymatic Nucleic Acid Molecule
ccgaagagaagagcaccagagaaacacacguugugguacauuaccuggua

SEQ ID NO: 3002 - RNA, 50 nt, Artificial Sequence
  Description of Artificial Sequence:  Enzymatic Nucleic Acid Molecule
gcacacagaagcccaccagagaaacacacguugugguacauuaccuggua

SEQ ID NO: 3003 - RNA, 50 nt, Artificial Sequence
  Description of Artificial Sequence:  Enzymatic Nucleic Acid Molecule
agacucagaagguaaccagagaaacacacguugugguacauuaccuggua

SEQ ID NO: 3004 - RNA, 50 nt, Artificial Sequence
  Description of Artificial Sequence:  Enzymatic Nucleic Acid Molecule
accgggagaagcauaccagagaaacacacguugugguacauuaccuggua

SEQ ID NO: 3005 - RNA, 50 nt, Artificial Sequence
  Description of Artificial Sequence:  Enzymatic Nucleic Acid Molecule
cgugaaagaaggggaccagagaaacacacguugugguacauuaccuggua

SEQ ID NO: 3006 - RNA, 50 nt, Artificial Sequence
  Description of Artificial Sequence:  Enzymatic Nucleic Acid Molecule
cgguacagaaggggaccagagaaacacacguugugguacauuaccuggua

SEQ ID NO: 3007 - RNA, 50 nt, Artificial Sequence
  Description of Artificial Sequence:  Enzymatic Nucleic Acid Molecule
guacgcagaaggcaaccagagaaacacacguugugguacauuaccuggua

SEQ ID NO: 3008 - RNA, 50 nt, Artificial Sequence
  Description of Artificial Sequence:  Enzymatic Nucleic Acid Molecule
cccuugagaagcguaccagagaaacacacguugugguacauuaccuggua

SEQ ID NO: 3009 - RNA, 50 nt, Artificial Sequence
  Description of Artificial Sequence:  Enzymatic Nucleic Acid Molecule
ggcggcagaagaugaccagagaaacacacguugugguacauuaccuggua

SEQ ID NO: 3010 - RNA, 50 nt, Artificial Sequence
  Description of Artificial Sequence:  Enzymatic Nucleic Acid Molecule
guugggagaaguacaccagagaaacacacguugugguacauuaccuggua

SEQ ID NO: 3011 - RNA, 50 nt, Artificial Sequence
  Description of Artificial Sequence:  Enzymatic Nucleic Acid Molecule
uccaccagaagcaaaccagagaaacacacguugugguacauuaccuggua

SEQ ID NO: 3012 - RNA, 50 nt, Artificial Sequence
  Description of Artificial Sequence:  Enzymatic Nucleic Acid Molecule
agucgaagaaguugaccagagaaacacacguugugguacauuaccuggua

SEQ ID NO: 3013 - RNA, 50 nt, Artificial Sequence
  Description of Artificial Sequence:  Enzymatic Nucleic Acid Molecule
guccagagaagugcaccagagaaacacacguugugguacauuaccuggua

SEQ ID NO: 3014 - RNA, 50 nt, Artificial Sequence
  Description of Artificial Sequence:  Enzymatic Nucleic Acid Molecule
cgcuccagaagucuaccagagaaacacacguugugguacauuaccuggua

SEQ ID NO: 3015 - RNA, 50 nt, Artificial Sequence
  Description of Artificial Sequence:  Enzymatic Nucleic Acid Molecule
acgacgagaagcgcaccagagaaacacacguugugguacauuaccuggua

SEQ ID NO: 3016 - RNA, 50 nt, Artificial Sequence
  Description of Artificial Sequence:  Enzymatic Nucleic Acid Molecule
guguugagaagagcaccagagaaacacacguugugguacauuaccuggua

SEQ ID NO: 3017 - RNA, 50 nt, Artificial Sequence
  Description of Artificial Sequence:  Enzymatic Nucleic Acid Molecule
ccgcuaagaaguauaccagagaaacacacguugugguacauuaccuggua

SEQ ID NO: 3018 - RNA, 50 nt, Artificial Sequence
  Description of Artificial Sequence:  Enzymatic Nucleic Acid Molecule
uagagcagaaguugaccagagaaacacacguugugguacauuaccuggua

SEQ ID NO: 3019 - RNA, 50 nt, Artificial Sequence
  Description of Artificial Sequence:  Enzymatic Nucleic Acid Molecule
gaaaucagaagucuaccagagaaacacacguugugguacauuaccuggua

SEQ ID NO: 3020 - RNA, 50 nt, Artificial Sequence
  Description of Artificial Sequence:  Enzymatic Nucleic Acid Molecule
gauccaagaagaaaaccagagaaacacacguugugguacauuaccuggua

SEQ ID NO: 3021 - RNA, 50 nt, Artificial Sequence
  Description of Artificial Sequence:  Enzymatic Nucleic Acid Molecule
cccgagagaaguucaccagagaaacacacguugugguacauuaccuggua

SEQ ID NO: 3022 - RNA, 50 nt, Artificial Sequence
  Description of Artificial Sequence:  Enzymatic Nucleic Acid Molecule
acacagagaagaagaccagagaaacacacguugugguacauuaccuggua

SEQ ID NO: 3023 - RNA, 50 nt, Artificial Sequence
  Description of Artificial Sequence:  Enzymatic Nucleic Acid Molecule
agucucagaaggcgaccagagaaacacacguugugguacauuaccuggua

SEQ ID NO: 3024 - RNA, 50 nt, Artificial Sequence
  Description of Artificial Sequence:  Enzymatic Nucleic Acid Molecule
cuggcaagaaggcaaccagagaaacacacguugugguacauuaccuggua

SEQ ID NO: 3025 - RNA, 50 nt, Artificial Sequence
  Description of Artificial Sequence:  Enzymatic Nucleic Acid Molecule
guuuggagaaggaaaccagagaaacacacguugugguacauuaccuggua

SEQ ID NO: 3026 - RNA, 50 nt, Artificial Sequence
  Description of Artificial Sequence:  Enzymatic Nucleic Acid Molecule
gguuuaagaaguauaccagagaaacacacguugugguacauuaccuggua

SEQ ID NO: 3027 - RNA, 50 nt, Artificial Sequence
  Description of Artificial Sequence:  Enzymatic Nucleic Acid Molecule
cuauacagaaggggaccagagaaacacacguugugguacauuaccuggua

SEQ ID NO: 3028 - RNA, 50 nt, Artificial Sequence
  Description of Artificial Sequence:  Enzymatic Nucleic Acid Molecule
auuuugagaagcucaccagagaaacacacguugugguacauuaccuggua

SEQ ID NO: 3029 - RNA, 50 nt, Artificial Sequence
  Description of Artificial Sequence:  Enzymatic Nucleic Acid Molecule
caggucagaagacaaccagagaaacacacguugugguacauuaccuggua

SEQ ID NO: 3030 - RNA, 50 nt, Artificial Sequence
  Description of Artificial Sequence:  Enzymatic Nucleic Acid Molecule
cuccagagaagccgaccagagaaacacacguugugguacauuaccuggua

SEQ ID NO: 3031 - RNA, 50 nt, Artificial Sequence
  Description of Artificial Sequence:  Enzymatic Nucleic Acid Molecule
ggccagagaagcaaaccagagaaacacacguugugguacauuaccuggua

SEQ ID NO: 3032 - RNA, 50 nt, Artificial Sequence
  Description of Artificial Sequence:  Enzymatic Nucleic Acid Molecule
aacaacagaaggccaccagagaaacacacguugugguacauuaccuggua

SEQ ID NO: 3033 - RNA, 50 nt, Artificial Sequence
  Description of Artificial Sequence:  Enzymatic Nucleic Acid Molecule
gggaacagaagccgaccagagaaacacacguugugguacauuaccuggua

SEQ ID NO: 3034 - RNA, 50 nt, Artificial Sequence
  Description of Artificial Sequence:  Enzymatic Nucleic Acid Molecule
ucggcgagaagcauaccagagaaacacacguugugguacauuaccuggua

SEQ ID NO: 3035 - RNA, 50 nt, Artificial Sequence
  Description of Artificial Sequence:  Enzymatic Nucleic Acid Molecule
ugcuugagaagcucaccagagaaacacacguugugguacauuaccuggua

SEQ ID NO: 3036 - RNA, 50 nt, Artificial Sequence
  Description of Artificial Sequence:  Enzymatic Nucleic Acid Molecule
gggagcagaagccuaccagagaaacacacguugugguacauuaccuggua

SEQ ID NO: 3037 - RNA, 50 nt, Artificial Sequence
  Description of Artificial Sequence:  Enzymatic Nucleic Acid Molecule
cacgggagaagcggaccagagaaacacacguugugguacauuaccuggua

SEQ ID NO: 3038 - RNA, 50 nt, Artificial Sequence
  Description of Artificial Sequence:  Enzymatic Nucleic Acid Molecule
uucccaagaagaguaccagagaaacacacguugugguacauuaccuggua

SEQ ID NO: 3039 - RNA, 50 nt, Artificial Sequence
  Description of Artificial Sequence:  Enzymatic Nucleic Acid Molecule
aaugccagaagugaaccagagaaacacacguugugguacauuaccuggua

SEQ ID NO: 3040 - RNA, 50 nt, Artificial Sequence
  Description of Artificial Sequence:  Enzymatic Nucleic Acid Molecule
gauagaagaagugaaccagagaaacacacguugugguacauuaccuggua

SEQ ID NO: 3041 - RNA, 50 nt, Artificial Sequence
  Description of Artificial Sequence:  Enzymatic Nucleic Acid Molecule
ugagcgagaaggugaccagagaaacacacguugugguacauuaccuggua

SEQ ID NO: 3042 - RNA, 50 nt, Artificial Sequence
  Description of Artificial Sequence:  Enzymatic Nucleic Acid Molecule
guggugagaagacuaccagagaaacacacguugugguacauuaccuggua

SEQ ID NO: 3043 - RNA, 50 nt, Artificial Sequence
  Description of Artificial Sequence:  Enzymatic Nucleic Acid Molecule
auguugagaaggagaccagagaaacacacguugugguacauuaccuggua

SEQ ID NO: 3044 - RNA, 50 nt, Artificial Sequence
  Description of Artificial Sequence:  Enzymatic Nucleic Acid Molecule
gaguugagaagccaaccagagaaacacacguugugguacauuaccuggua

SEQ ID NO: 3045 - RNA, 50 nt, Artificial Sequence
  Description of Artificial Sequence:  Enzymatic Nucleic Acid Molecule
ggccgaagaagcacaccagagaaacacacguugugguacauuaccuggua

SEQ ID NO: 3046 - RNA, 50 nt, Artificial Sequence
  Description of Artificial Sequence:  Enzymatic Nucleic Acid Molecule
cacgaaagaagaagaccagagaaacacacguugugguacauuaccuggua

SEQ ID NO: 3047 - RNA, 50 nt, Artificial Sequence
  Description of Artificial Sequence:  Enzymatic Nucleic Acid Molecule
guccucagaagaggaccagagaaacacacguugugguacauuaccuggua

SEQ ID NO: 3048 - RNA, 50 nt, Artificial Sequence
  Description of Artificial Sequence:  Enzymatic Nucleic Acid Molecule
gcuaucagaagguuaccagagaaacacacguugugguacauuaccuggua

SEQ ID NO: 3049 - RNA, 50 nt, Artificial Sequence
  Description of Artificial Sequence:  Enzymatic Nucleic Acid Molecule
gagaggagaagaguaccagagaaacacacguugugguacauuaccuggua

SEQ ID NO: 3050 - RNA, 50 nt, Artificial Sequence
  Description of Artificial Sequence:  Enzymatic Nucleic Acid Molecule
uggugaagaaggagaccagagaaacacacguugugguacauuaccuggua

SEQ ID NO: 3051 - RNA, 50 nt, Artificial Sequence
  Description of Artificial Sequence:  Enzymatic Nucleic Acid Molecule
uucagcagaagaguaccagagaaacacacguugugguacauuaccuggua

SEQ ID NO: 3052 - RNA, 50 nt, Artificial Sequence
  Description of Artificial Sequence:  Enzymatic Nucleic Acid Molecule
cucuucagaagcugaccagagaaacacacguugugguacauuaccuggua

SEQ ID NO: 3053 - RNA, 50 nt, Artificial Sequence
  Description of Artificial Sequence:  Enzymatic Nucleic Acid Molecule
gcguggagaaguccaccagagaaacacacguugugguacauuaccuggua

SEQ ID NO: 3054 - RNA, 50 nt, Artificial Sequence
  Description of Artificial Sequence:  Enzymatic Nucleic Acid Molecule
gccacgagaaggagaccagagaaacacacguugugguacauuaccuggua

SEQ ID NO: 3055 - RNA, 50 nt, Artificial Sequence
  Description of Artificial Sequence:  Enzymatic Nucleic Acid Molecule
cuugaaagaagucaaccagagaaacacacguugugguacauuaccuggua

SEQ ID NO: 3056 - RNA, 50 nt, Artificial Sequence
  Description of Artificial Sequence:  Enzymatic Nucleic Acid Molecule
agcuugagaaggagaccagagaaacacacguugugguacauuaccuggua

SEQ ID NO: 3057 - RNA, 50 nt, Artificial Sequence
  Description of Artificial Sequence:  Enzymatic Nucleic Acid Molecule
aauuucagaaggagaccagagaaacacacguugugguacauuaccuggua

SEQ ID NO: 3058 - RNA, 50 nt, Artificial Sequence
  Description of Artificial Sequence:  Enzymatic Nucleic Acid Molecule
cacaugagaaggugaccagagaaacacacguugugguacauuaccuggua

SEQ ID NO: 3059 - RNA, 50 nt, Artificial Sequence
  Description of Artificial Sequence:  Enzymatic Nucleic Acid Molecule
ucauggagaaguuuaccagagaaacacacguugugguacauuaccuggua

SEQ ID NO: 3060 - RNA, 50 nt, Artificial Sequence
  Description of Artificial Sequence:  Enzymatic Nucleic Acid Molecule
cucuucagaagccaaccagagaaacacacguugugguacauuaccuggua

SEQ ID NO: 3061 - RNA, 50 nt, Artificial Sequence
  Description of Artificial Sequence:  Enzymatic Nucleic Acid Molecule
uucgggagaagggaaccagagaaacacacguugugguacauuaccuggua

SEQ ID NO: 3062 - RNA, 50 nt, Artificial Sequence
  Description of Artificial Sequence:  Enzymatic Nucleic Acid Molecule
cugugcagaagcacaccagagaaacacacguugugguacauuaccuggua

SEQ ID NO: 3063 - RNA, 50 nt, Artificial Sequence
  Description of Artificial Sequence:  Enzymatic Nucleic Acid Molecule
ggagagagaagcacaccagagaaacacacguugugguacauuaccuggua

SEQ ID NO: 3064 - RNA, 50 nt, Artificial Sequence
  Description of Artificial Sequence:  Enzymatic Nucleic Acid Molecule
caugggagaagugaaccagagaaacacacguugugguacauuaccuggua

SEQ ID NO: 3065 - RNA, 50 nt, Artificial Sequence
  Description of Artificial Sequence:  Enzymatic Nucleic Acid Molecule
ugccacagaagguuaccagagaaacacacguugugguacauuaccuggua

SEQ ID NO: 3066 - RNA, 50 nt, Artificial Sequence
  Description of Artificial Sequence:  Enzymatic Nucleic Acid Molecule
ggagggagaagugaaccagagaaacacacguugugguacauuaccuggua

SEQ ID NO: 3067 - RNA, 50 nt, Artificial Sequence
  Description of Artificial Sequence:  Enzymatic Nucleic Acid Molecule
cugaagagaaggccaccagagaaacacacguugugguacauuaccuggua

SEQ ID NO: 3068 - RNA, 50 nt, Artificial Sequence
  Description of Artificial Sequence:  Enzymatic Nucleic Acid Molecule
gucagcagaaggggaccagagaaacacacguugugguacauuaccuggua

SEQ ID NO: 3069 - RNA, 50 nt, Artificial Sequence
  Description of Artificial Sequence:  Enzymatic Nucleic Acid Molecule
gaugagagaagcguaccagagaaacacacguugugguacauuaccuggua

SEQ ID NO: 3070 - RNA, 50 nt, Artificial Sequence
  Description of Artificial Sequence:  Enzymatic Nucleic Acid Molecule
gcucgaagaaggucaccagagaaacacacguugugguacauuaccuggua

SEQ ID NO: 3071 - RNA, 50 nt, Artificial Sequence
  Description of Artificial Sequence:  Enzymatic Nucleic Acid Molecule
ugcugcagaagauaaccagagaaacacacguugugguacauuaccuggua

SEQ ID NO: 3072 - RNA, 50 nt, Artificial Sequence
  Description of Artificial Sequence:  Enzymatic Nucleic Acid Molecule
guuguaagaagggcaccagagaaacacacguugugguacauuaccuggua

SEQ ID NO: 3073 - RNA, 50 nt, Artificial Sequence
  Description of Artificial Sequence:  Enzymatic Nucleic Acid Molecule
gacguaagaaggacaccagagaaacacacguugugguacauuaccuggua

SEQ ID NO: 3074 - RNA, 50 nt, Artificial Sequence
  Description of Artificial Sequence:  Enzymatic Nucleic Acid Molecule
gugguaagaagcaaaccagagaaacacacguugugguacauuaccuggua

SEQ ID NO: 3075 - RNA, 50 nt, Artificial Sequence
  Description of Artificial Sequence:  Enzymatic Nucleic Acid Molecule
cguggaagaaguauaccagagaaacacacguugugguacauuaccuggua

SEQ ID NO: 3076 - RNA, 50 nt, Artificial Sequence
  Description of Artificial Sequence:  Enzymatic Nucleic Acid Molecule
cagaacagaaguccaccagagaaacacacguugugguacauuaccuggua

SEQ ID NO: 3077 - RNA, 50 nt, Artificial Sequence
  Description of Artificial Sequence:  Enzymatic Nucleic Acid Molecule
cgccaaagaagaagaccagagaaacacacguugugguacauuaccuggua

SEQ ID NO: 3078 - RNA, 50 nt, Artificial Sequence
  Description of Artificial Sequence:  Enzymatic Nucleic Acid Molecule
auccggagaagccgaccagagaaacacacguugugguacauuaccuggua

SEQ ID NO: 3079 - RNA, 50 nt, Artificial Sequence
  Description of Artificial Sequence:  Enzymatic Nucleic Acid Molecule
ccgacgagaaggagaccagagaaacacacguugugguacauuaccuggua

SEQ ID NO: 3080 - RNA, 50 nt, Artificial Sequence
  Description of Artificial Sequence:  Enzymatic Nucleic Acid Molecule
gucaacagaagacgaccagagaaacacacguugugguacauuaccuggua

SEQ ID NO: 3081 - RNA, 50 nt, Artificial Sequence
  Description of Artificial Sequence:  Enzymatic Nucleic Acid Molecule
gcugucagaagccgaccagagaaacacacguugugguacauuaccuggua

SEQ ID NO: 3082 - RNA, 50 nt, Artificial Sequence
  Description of Artificial Sequence:  Enzymatic Nucleic Acid Molecule
gggaggagaagucgaccagagaaacacacguugugguacauuaccuggua

SEQ ID NO: 3083 - RNA, 50 nt, Artificial Sequence
  Description of Artificial Sequence:  Enzymatic Nucleic Acid Molecule
ggucugagaaggagaccagagaaacacacguugugguacauuaccuggua

SEQ ID NO: 3084 - RNA, 50 nt, Artificial Sequence
  Description of Artificial Sequence:  Enzymatic Nucleic Acid Molecule
ucagagagaagaucaccagagaaacacacguugugguacauuaccuggua

SEQ ID NO: 3085 - RNA, 50 nt, Artificial Sequence
  Description of Artificial Sequence:  Enzymatic Nucleic Acid Molecule
accgucagaagaggaccagagaaacacacguugugguacauuaccuggua

SEQ ID NO: 3086 - RNA, 50 nt, Artificial Sequence
  Description of Artificial Sequence:  Enzymatic Nucleic Acid Molecule
cucaacagaagauuaccagagaaacacacguugugguacauuaccuggua

SEQ ID NO: 3087 - RNA, 50 nt, Artificial Sequence
  Description of Artificial Sequence:  Enzymatic Nucleic Acid Molecule
gcugagagaaggguaccagagaaacacacguugugguacauuaccuggua

SEQ ID NO: 3088 - RNA, 50 nt, Artificial Sequence
  Description of Artificial Sequence:  Enzymatic Nucleic Acid Molecule
uugagcagaagacgaccagagaaacacacguugugguacauuaccuggua

SEQ ID NO: 3089 - RNA, 50 nt, Artificial Sequence
  Description of Artificial Sequence:  Enzymatic Nucleic Acid Molecule
acauugagaagcagaccagagaaacacacguugugguacauuaccuggua

SEQ ID NO: 3090 - RNA, 50 nt, Artificial Sequence
  Description of Artificial Sequence:  Enzymatic Nucleic Acid Molecule
ggcgugagaagggcaccagagaaacacacguugugguacauuaccuggua

SEQ ID NO: 3091 - RNA, 50 nt, Artificial Sequence
  Description of Artificial Sequence:  Enzymatic Nucleic Acid Molecule
uugaugagaagcuuaccagagaaacacacguugugguacauuaccuggua

SEQ ID NO: 3092 - RNA, 50 nt, Artificial Sequence
  Description of Artificial Sequence:  Enzymatic Nucleic Acid Molecule
ugacgcagaagagaaccagagaaacacacguugugguacauuaccuggua

SEQ ID NO: 3093 - RNA, 50 nt, Artificial Sequence
  Description of Artificial Sequence:  Enzymatic Nucleic Acid Molecule
cuugcaagaagucaaccagagaaacacacguugugguacauuaccuggua

SEQ ID NO: 3094 - RNA, 50 nt, Artificial Sequence
  Description of Artificial Sequence:  Enzymatic Nucleic Acid Molecule
gggggcagaagcuuaccagagaaacacacguugugguacauuaccuggua

SEQ ID NO: 3095 - RNA, 50 nt, Artificial Sequence
  Description of Artificial Sequence:  Enzymatic Nucleic Acid Molecule
acacggagaagaugaccagagaaacacacguugugguacauuaccuggua

SEQ ID NO: 3096 - RNA, 50 nt, Artificial Sequence
  Description of Artificial Sequence:  Enzymatic Nucleic Acid Molecule
ucuuccagaaggucaccagagaaacacacguugugguacauuaccuggua

SEQ ID NO: 3097 - RNA, 50 nt, Artificial Sequence
  Description of Artificial Sequence:  Enzymatic Nucleic Acid Molecule
aaggcgagaaggcuaccagagaaacacacguugugguacauuaccuggua

SEQ ID NO: 3098 - RNA, 50 nt, Artificial Sequence
  Description of Artificial Sequence:  Enzymatic Nucleic Acid Molecule
ucccagagaagggaaccagagaaacacacguugugguacauuaccuggua

SEQ ID NO: 3099 - RNA, 50 nt, Artificial Sequence
  Description of Artificial Sequence:  Enzymatic Nucleic Acid Molecule
acuggaagaaguacaccagagaaacacacguugugguacauuaccuggua

SEQ ID NO: 3100 - RNA, 50 nt, Artificial Sequence
  Description of Artificial Sequence:  Enzymatic Nucleic Acid Molecule
caaagcagaaggugaccagagaaacacacguugugguacauuaccuggua

SEQ ID NO: 3101 - RNA, 50 nt, Artificial Sequence
  Description of Artificial Sequence:  Enzymatic Nucleic Acid Molecule
agucaaagaagcggaccagagaaacacacguugugguacauuaccuggua

SEQ ID NO: 3102 - RNA, 50 nt, Artificial Sequence
  Description of Artificial Sequence:  Enzymatic Nucleic Acid Molecule
auguagagaagcucaccagagaaacacacguugugguacauuaccuggua

SEQ ID NO: 3103 - RNA, 50 nt, Artificial Sequence
  Description of Artificial Sequence:  Enzymatic Nucleic Acid Molecule
gaauuaagaaggggaccagagaaacacacguugugguacauuaccuggua

SEQ ID NO: 3104 - RNA, 50 nt, Artificial Sequence
  Description of Artificial Sequence:  Enzymatic Nucleic Acid Molecule
cuagucagaagcacaccagagaaacacacguugugguacauuaccuggua

SEQ ID NO: 3105 - RNA, 50 nt, Artificial Sequence
  Description of Artificial Sequence:  Enzymatic Nucleic Acid Molecule
ucgacaagaagcagaccagagaaacacacguugugguacauuaccuggua

SEQ ID NO: 3106 - RNA, 50 nt, Artificial Sequence
  Description of Artificial Sequence:  Enzymatic Nucleic Acid Molecule
cagcucagaaggccaccagagaaacacacguugugguacauuaccuggua

SEQ ID NO: 3107 - RNA, 50 nt, Artificial Sequence
  Description of Artificial Sequence:  Enzymatic Nucleic Acid Molecule
ggggggagaagaguaccagagaaacacacguugugguacauuaccuggua

SEQ ID NO: 3108 - RNA, 50 nt, Artificial Sequence
  Description of Artificial Sequence:  Enzymatic Nucleic Acid Molecule
gguuggagaaggucaccagagaaacacacguugugguacauuaccuggua

SEQ ID NO: 3109 - RNA, 50 nt, Artificial Sequence
  Description of Artificial Sequence:  Enzymatic Nucleic Acid Molecule
gugcgcagaagacaaccagagaaacacacguugugguacauuaccuggua

SEQ ID NO: 3110 - RNA, 50 nt, Artificial Sequence
  Description of Artificial Sequence:  Enzymatic Nucleic Acid Molecule
uuuucaagaaguucaccagagaaacacacguugugguacauuaccuggua

SEQ ID NO: 3111 - RNA, 50 nt, Artificial Sequence
  Description of Artificial Sequence:  Enzymatic Nucleic Acid Molecule
ccguagagaagacaaccagagaaacacacguugugguacauuaccuggua

SEQ ID NO: 3112 - RNA, 50 nt, Artificial Sequence
  Description of Artificial Sequence:  Enzymatic Nucleic Acid Molecule
ugaaugagaagaggaccagagaaacacacguugugguacauuaccuggua

SEQ ID NO: 3113 - RNA, 50 nt, Artificial Sequence
  Description of Artificial Sequence:  Enzymatic Nucleic Acid Molecule
cgcaagagaaguacaccagagaaacacacguugugguacauuaccuggua

SEQ ID NO: 3114 - RNA, 50 nt, Artificial Sequence
  Description of Artificial Sequence:  Enzymatic Nucleic Acid Molecule
ccuuggagaaguagaccagagaaacacacguugugguacauuaccuggua

SEQ ID NO: 3115 - RNA, 50 nt, Artificial Sequence
  Description of Artificial Sequence:  Enzymatic Nucleic Acid Molecule
ggacgcagaagggaaccagagaaacacacguugugguacauuaccuggua

SEQ ID NO: 3116 - RNA, 50 nt, Artificial Sequence
  Description of Artificial Sequence:  Enzymatic Nucleic Acid Molecule
aaguccagaagggaaccagagaaacacacguugugguacauuaccuggua

SEQ ID NO: 3117 - RNA, 50 nt, Artificial Sequence
  Description of Artificial Sequence:  Enzymatic Nucleic Acid Molecule
cgaaccagaaggacaccagagaaacacacguugugguacauuaccuggua

SEQ ID NO: 3118 - RNA, 50 nt, Artificial Sequence
  Description of Artificial Sequence:  Enzymatic Nucleic Acid Molecule
gagacaagaagugaaccagagaaacacacguugugguacauuaccuggua

SEQ ID NO: 3119 - RNA, 50 nt, Artificial Sequence
  Description of Artificial Sequence:  Enzymatic Nucleic Acid Molecule
gcacgaagaaggcuaccagagaaacacacguugugguacauuaccuggua

SEQ ID NO: 3120 - RNA, 50 nt, Artificial Sequence
  Description of Artificial Sequence:  Enzymatic Nucleic Acid Molecule
agcgggagaaggcaaccagagaaacacacguugugguacauuaccuggua

SEQ ID NO: 3121 - RNA, 50 nt, Artificial Sequence
  Description of Artificial Sequence:  Enzymatic Nucleic Acid Molecule
uaaaccagaaggguaccagagaaacacacguugugguacauuaccuggua

SEQ ID NO: 3122 - RNA, 50 nt, Artificial Sequence
  Description of Artificial Sequence:  Enzymatic Nucleic Acid Molecule
uuggggagaagguaaccagagaaacacacguugugguacauuaccuggua

SEQ ID NO: 3123 - RNA, 37 nt, Artificial Sequence
  Description of Artificial Sequence:  Enzymatic Nucleic Acid Molecule
  misc_feature (1)..(5): 2'-O-methyl
  misc_feature (27)..(36): 2'-O-methyl
  misc_feature (9)..(9): phosphorothioate 3'-internucleotide linkage
  misc_feature (37)..(37): n stands for inverted deoxy abasic derivative
auccuugauggcauacacuaugcgcgaugaucugcan

SEQ ID NO: 3124 - RNA, 37 nt, Artificial Sequence
  Description of Artificial Sequence:  Enzymatic Nucleic Acid Molecule
  misc_feature (1)..(6): 2'-O-methyl
  misc_feature (10)..(14): 2'-O-methyl
  misc_feature (16)..(36): 2'-O-methyl
  misc_feature (9)..(9): phosphorothioate 3'-internucleotide linkage
  misc_feature (37)..(37): n stands for inverted deoxyabasic derivative
acacuugauggcaugcacuaugcgcgauacuaacgcn

SEQ ID NO: 3125 - RNA, 37 nt, Artificial Sequence
  Description of Artificial Sequence:  Enzymatic Nucleic Acid Molecule
  misc_feature (1)..(6): 2'-O-methyl
  misc_feature (10)..(14): 2'-O-methyl
  misc_feature (16)..(36): 2'-O-methyl
  misc_feature (9)..(9): phosphorothioate 3'-internucleotide linkage
  misc_feature (37)..(37): n stands for inverted deoxyabasic derivative
cacgaugauggcaugcacuaugcgcgacucauacuan

SEQ ID NO: 3126 - RNA, 37 nt, Artificial Sequence
  Description of Artificial Sequence:  Enzymatic Nucleic Acid Molecule
  misc_feature (1)..(6): 2'-O-methyl
  misc_feature (10)..(14): 2'-O-methyl
  misc_feature (16)..(36): 2'-O-methyl
  misc_feature (9)..(9): phosphorothioate 3'-internucleotide linkage
  misc_feature (37)..(37): n stands for inverted deoxyabasic derivative
ggcugugauggcaugcacuaugcgcgacgacacucan

SEQ ID NO: 3127 - RNA, 37 nt, Artificial Sequence
  Description of Artificial Sequence:  Enzymatic Nucleic Acid Molecule
  misc_feature (1)..(6): 2'-O-methyl
  misc_feature (10)..(14): 2'-O-methyl
  misc_feature (16)..(36): 2'-O-methyl
  misc_feature (9)..(9): phosphorothioate 3'-internucleotide linkage
  misc_feature (37)..(37): n stands for inverted deoxyabasic derivative
cccaaugauggcaugcacuaugcgcgacuacucggcn

SEQ ID NO: 3128 - RNA, 37 nt, Artificial Sequence
  Description of Artificial Sequence:  Enzymatic Nucleic Acid Molecule
  misc_feature (1)..(6): 2'-O-methyl
  misc_feature (10)..(14): 2'-O-methyl
  misc_feature (16)..(36): 2'-O-methyl
  misc_feature (9)..(9): phosphorothioate 3'-internucleotide linkage
  misc_feature (37)..(37): n stands for inverted deoxyabasic derivative
uuucgugauggcaugcacuaugcgcggacccaacacn

SEQ ID NO: 3129 - RNA, 37 nt, Artificial Sequence
  Description of Artificial Sequence:  Enzymatic Nucleic Acid Molecule
  misc_feature (1)..(6): 2'-O-methyl
  misc_feature (10)..(14): 2'-O-methyl
  misc_feature (16)..(36): 2'-O-methyl
  misc_feature (9)..(9): phosphorothioate 3'-internucleotide linkage
  misc_feature (37)..(37): n stands for inverted deoxyabasic derivative
ucaggugauggcaugcacuaugcgcgaguaccacaan

SEQ ID NO: 3130 - RNA, 37 nt, Artificial Sequence
  Description of Artificial Sequence:  Enzymatic Nucleic Acid Molecule
  misc_feature (1)..(6): 2'-O-methyl
  misc_feature (10)..(14): 2'-O-methyl
  misc_feature (16)..(36): 2'-O-methyl
  misc_feature (9)..(9): phosphorothioate 3'-internucleotide linkage
  misc_feature (37)..(37): n stands for inverted deoxyabasic derivative
gcacuugauggcaugcacuaugcgcggcaagcacccn

SEQ ID NO: 3131 - RNA, 33 nt, Artificial Sequence
  Description of Artificial Sequence:  Enzymatic Nucleic Acid Molecule
  misc_feature (1)..(4): phosphorothioate 3'-internucleotide linkage
  misc_feature (1)..(7): 2'-O-methyl
  misc_feature (11)..(11): 2'-O-methyl
  misc_feature (13)..(23): 2'-O-methyl
  misc_feature (25)..(26): 2'-O-methyl
  misc_feature (28)..(32): 2'-O-methyl
  misc_feature (8)..(8): 2'-deoxy-2'-C-Allyl
auuccacuagugaggcguuagccgauacgcgan

SEQ ID NO: 3132 - RNA, 54 nt, Artificial Sequence
  Description of Artificial Sequence:  Enzymatic Nucleic Acid Molecule
  misc_feature (1)..(14): 2'-O-methyl
  misc_feature (18)..(27): 2'-O-methyl
  misc_feature (49)..(53): 2'-O-methyl
  misc_feature (54)..(54): n stands for inverted deoxyabasic derivative
  misc_feature (15)..(16): 2'-deoxy-2'-amino
  misc_feature (28)..(32): 2'-deoxy-2'-amino
  misc_feature (38)..(38): 2'-deoxy-2'-amino
  misc_feature (40)..(41): 2'-deoxy-2'-amino
  misc_feature (43)..(45): 2'-deoxy-2'-amino
ggaaaggugugcaaccggaggaaacucccuucaaggacaucguccgggacggcn

SEQ ID NO: 3133 - RNA, 51 nt, Artificial Sequence
  Description of Artificial Sequence:  Enzymatic Nucleic Acid Molecule
  misc_feature (1)..(9): 2'-O-methyl
  misc_feature (12)..(21): 2'-O-methyl
  misc_feature (44)..(50): 2'-O-methyl
  misc_feature (10)..(10): 2'-deoxy-2'-amino
  misc_feature (22)..(26): 2'-deoxy-2'-amino
  misc_feature (32)..(32): 2'-deoxy-2'-amino
  misc_feature (38)..(40): 2'-deoxy-2'-amino
  misc_feature (51)..(51): n stands for inverted deoxyabasic derivative
uuccgcagacggaggaaacucccuucaaggacgaaaguccgggacuauggn

SEQ ID NO: 3134 - RNA, 49 nt, Artificial Sequence
  Description of Artificial Sequence:  Enzymatic Nucleic Acid Molecule
  misc_feature (1)..(7): 2'-O-methyl
  misc_feature (10)..(19): 2'-O-methyl
  misc_feature (42)..(48): 2'-O-methyl
  misc_feature (8)..(8): 2'-deoxy-2'-amino
  misc_feature (20)..(24): 2'-deoxy-2'-amino
  misc_feature (30)..(30): 2'-deoxy-2'-amino
  misc_feature (36)..(38): 2'-deoxy-2'-amino
  misc_feature (49)..(49): n stands for inverted deoxyabasic derivative
ccgcagacggaggaaacucccuucaaggacgaaaguccgggacuauggn

SEQ ID NO: 3135 - RNA, 49 nt, Artificial Sequence
  Description of Artificial Sequence:  Enzymatic Nucleic Acid Molecule
  misc_feature (1)..(9): 2'-O-methyl
  misc_feature (12)..(21): 2'-O-methyl
  misc_feature (43)..(48): 2'-O-methyl
  misc_feature (10)..(10): 2'-deoxy-2'-amino
  misc_feature (22)..(26): 2'-deoxy-2'-amino
  misc_feature (32)..(32): 2'-deoxy-2'-amino
  misc_feature (34)..(35): 2'-deoxy-2'-amino
  misc_feature (37)..(39): 2'-deoxy-2'-amino
  misc_feature (49)..(49): n stands for inverted deoxyabasic derivative
cagguaguacggaggaaacucccuucaaggacaucguccgggacaaggn

SEQ ID NO: 3136 - RNA, 49 nt, Artificial Sequence
  Description of Artificial Sequence:  Enzymatic Nucleic Acid Molecule
  misc_feature (1)..(8): 2'-O-methyl
  misc_feature (10)..(10): 2'-O-methyl
  misc_feature (12)..(21): 2'-O-methyl
  misc_feature (43)..(48): 2'-O-methyl
  misc_feature (9)..(9): 2'-deoxy-2'-amino
  misc_feature (22)..(26): 2'-deoxy-2'-amino
  misc_feature (32)..(32): 2'-deoxy-2'-amino
  misc_feature (34)..(35): 2'-deoxy-2'-amino
  misc_feature (37)..(39): 2'-deoxy-2'-amino
  misc_feature (49)..(49): n stands for inveted deoxyabasic derivative
gcacggucuaggaggaaacucccuucaaggacaucguccggggagaccn

SEQ ID NO: 3137 - RNA, 48 nt, Artificial Sequence
  Description of Artificial Sequence:  Enzymatic Nucleic Acid Molecule
  misc_feature (1)..(10): 2'-O-methyl
  misc_feature (12)..(21): 2'-O-methyl
  misc_feature (43)..(47): 2'-O-methyl
  misc_feature (22)..(26): 2'-deoxy-2'-amino
  misc_feature (32)..(32): 2'-deoxy-2'-amino
  misc_feature (34)..(35): 2'-deoxy-2'-amino
  misc_feature (37)..(39): 2'-deoxy-2'-amino
  misc_feature (48)..(48): n stands for inverted deoxyabasic derivative
guguacucacggaggaaacucccuucaaggacaucguccggggguucn

SEQ ID NO: 3138 - RNA, 15 nt, Artificial Sequence
  Description of Artificial Sequence:  Nucleic Acid Target
  misc_feature (1)..(7): n stands for any a, g, c, or u
  misc_feature (9)..(9): n stands for any a, g, c, or u
  misc_feature (13)..(15): n stands for any a, g, c, or u
nnnnnnnynghynnn

SEQ ID NO: 3139 - RNA, 47 nt, Artificial Sequence
  Description of Artificial Sequence:  Enzymatic Nucleic Acid Molecule
  misc_feature (1)..(4): n stands for any a, g, c, or u
  misc_feature (9)..(19): n stands for any a, g, c, or u
  misc_feature (25)..(31): n stands for any a, g, c, or u
  misc_feature (39)..(47): n stands for any a, g, c, or u
nnnngaagnnnnnnnnnnnaaahannnnnnnacauuacnnnnnnnnn

SEQ ID NO: 3140 - RNA, 13 nt, Artificial Sequence
  Description of Artificial Sequence:  Nucleic Acid Target
gguccuuucuugg

SEQ ID NO: 3141 - RNA, 37 nt, Artificial Sequence
  Description of Artificial Sequence:  Enzymatic Nucleic Acid Molecule
  misc_feature (1)..(4): phosphorothioate 3'-internucleotide sequence
  misc_feature (1)..(8): 2'-O-methyl
  misc_feature (12)..(12): 2'-O-methyl
  misc_feature (14)..(26): 2'-O-methyl
  misc_feature (28)..(29): 2'-O-methyl
  misc_feature (31)..(36): 2'-O-methyl
  misc_feature (9)..(9): 2'-deoxy-2'-C-allyl
  misc_feature (37)..(37): n stands for inverted deoxyabasic derivative
uccaagacugaugaggccguuaggccgaaaggacccn

SEQ ID NO: 3142 - RNA, 35 nt, Artificial Sequence
  Description of Artificial Sequence:  Enzymatic Nucleic Acid Molecule
  misc_feature (1)..(4): phosphorothioate 3'-internucleotide linkage
  misc_feature (9)..(9): 2'-deoxy-2'-C-allyl
  misc_feature (1)..(8): 2'-O-methyl
  misc_feature (12)..(12): 2'-O-methyl
  misc_feature (14)..(24): 2'-O-methyl
  misc_feature (26)..(27): 2'-O-methyl
  misc_feature (29)..(34): 2'-O-methyl
  misc_feature (35)..(35): n stands for inverted deoxyabasic derivative
uccaagacugaugaggcguuagccgaaaggacccn

SEQ ID NO: 3143 - RNA, 35 nt, Artificial Sequence
  Description of Artificial Sequence:  Enzymatic Nucleic Acid Molecule
  misc_feature (1)..(4): phosphorothioate 3'-internucleotide linkage
  misc_feature (1)..(7): 2'-O-methyl
  misc_feature (11)..(11): 2'-O-methyl
  misc_feature (13)..(25): 2'-O-methyl
  misc_feature (27)..(28): 2'-O-methyl
  misc_feature (30)..(34): 2'-O-methyl
  misc_feature (8)..(8): 2'-deoxy-2'-C-allyl
  misc_feature (35)..(35): n stands for inverted deoxyabasic derivative
ccaagacugaugaggccguuaggccgaaaggaccn

SEQ ID NO: 3144 - RNA, 33 nt, Artificial Sequence
  Description of Artificial Sequence:  Enzymatic Nucleic Acid Molecule
  misc_feature (1)..(4): phosphorothioate 3'-internucleotide linkage
  misc_feature (1)..(7): 2'-O-methyl
  misc_feature (11)..(11): 2'-O-methyl
  misc_feature (13)..(23): 2'-O-methyl
  misc_feature (25)..(26): 2'-O-methyl
  misc_feature (28)..(32): 2'-O-methyl
  misc_feature (8)..(8): 2'-deoxy-2'-C-allyl
  misc_feature (33)..(33): n stands for inverted deoxyabasic derivative
ccaagacugaugaggcguuagccgaaaggaccn

SEQ ID NO: 3145 - RNA, 54 nt, Artificial sequence
  misc_feature (1)..(16): n stands for any 2'-O-methyl derivative of a, g, c, or u.
  misc_feature: Description of artificial sequence:  Enzymatic nucleic acid
  misc_feature (50)..(54): n stands for any 2'-O-methyl derivative of a, g, c, or u.
  misc_feature (18)..(27): 2'-O-methyl derivatives
  misc_feature (28)..(32): 2'-deoxy-2'amino derivatives
  misc_feature (44)..(46): 2'-deoxy-2'amino derivatives
  misc_feature (38)..(43): 2'-O-methyl derivatives
nnnnnnnnnnnnnnnnggaggaaacucccuucaaggacgaaaguccgggnnnnn

SEQ ID NO: 3146 - RNA, 18 nt, Artificial Sequence
  misc_feature: Description of artificial sequence: Substrate nucleic acid
  misc_feature (1)..(5): n stands for any a, g, c, or u
  misc_feature (7)..(18): n stands for any a, g, c, or u
nnnnngnnnnnnnnnnnn

SEQ ID NO: 3147 - RNA, 35 nt, Artificial Sequence
  misc_feature: Description of artificial sequence: Enzymatic nucleic acid
  misc_feature (9)..(9): 2'-deoxy-2'-C-allyl or 2'-deoxy-2'-amino derivative
  misc_feature (12)..(12): 2'-deoxy-2'-C-allyl or 2'-deoxy-2'-amino derivative
  misc_feature (1)..(7): n stands for 2'-O-methyl derivatives of any a, g, c, or u.
  misc_feature (8)..(8): 2'-O-methyl derivative
  misc_feature (14)..(26): 2'-O-methyl derivatives
  misc_feature (16)..(18): n stands for any a, g, c, or u.
  misc_feature (23)..(25): n stands for any a, g, c, or u.
  misc_feature (28)..(29): 2'-O-methyl derivatives
  misc_feature (30)..(30): n stands for inosine
  misc_feature (31)..(35): n stands for 2'-O-methyl derivatives of any a, g, c, or u.
nnnnnnncugaugagnnngaaannncgaannnnnn

SEQ ID NO: 3148 - RNA, 35 nt, Artificial Sequence
  misc_feature: Description of artificial sequence: Enzymatic nucleic acid
  misc_feature (1)..(8): 2'-O-methyl derivatives
  misc_feature (1)..(7): n stands for any a, g, c, or u.
  misc_feature (11)..(12): phosphorothioate internucleotide linkage.
  misc_feature (13)..(16): 2'-O-methyl derivatives
  misc_feature (18)..(35): 2'-O-methyl derivatives
  misc_feature (29)..(35): n stands for any a, g, c, or u.
nnnnnnnugaugggaugaacuauccgcgnnnnnnn
